(19) United States
(12) Patent Application Publication
(10) Pub. No.: US 2003/0134349 A1
(43) Pub. Date: Jul. 17, 2003

(54) Enzymes for the detection of nucleic acid sequences

(75) Inventors: Wu-Po Ma, Madison, WI (US); Victor I. Lyamichev, Madison, WI (US); Michael W. Kaiser, Madison, WI (US); Natalie E. Lyamicheva, Madison, WI (US); Hatim Taysir Allawi, Madison, WI (US); James J. Schaefer, Madison, WI (US); Bruce P. Neri, Madison, WI (US)

Correspondence Address: MEDLEN & CARROLL, LLP, 101 HOWARD STREET, SUITE 350, SAN FRANCISCO, CA, 94105, US

(73) Assignee: Third Wave Technologies, Inc.

(21) Appl. No.: 09/758,282

(22) Filed: Jan. 11, 2001

Related U.S. Application Data
(63) Continuation-in-part of application No. 09/577,304, filed on May 24, 2000.

(51) Int. Cl. C12Q 1/68; C07H 21/04; C12N 9/22; C12P 21/02; C12N 5/06

(52) U.S. Cl. 435/69.1; 435/325; 435/320.1; 536/23.2; 435/6; 435/199

(57) ABSTRACT

The present invention relates to novel enzymes designed for direct detection, characterization and quantitation of nucleic acids, particularly RNA. The present invention provides enzymes that recognize specific nucleic acid cleavage structures formed on a target RNA sequence and that cleave the nucleic acid cleavage structure in a site-specific manner to produce non-target cleavage products. The present invention provides enzymes having an improved ability to specifically cleave a DNA member of a complex comprising DNA and RNA nucleic acid strands.

[0001] This application is a continuation-in-part of co-pending application Ser. No. 09/577,304, filed May 24, 2000.

[0002] This invention was made with United States Government support under Cooperative Agreement Number 70NANB7H3015, awarded by the National Institute of Standards and Technology (NIST). The United States Government has certain rights in the invention.

### FIELD OF THE INVENTION

[0003] The present invention relates to novel enzymes designed for direct detection, characterization and quantitation of nucleic acids, particularly RNA. The present invention provides enzymes that recognize specific nucleic acid cleavage structures formed on a target RNA sequence and that cleave the nucleic acid cleavage structure in a site-specific manner to produce non-target cleavage products. The present invention provides enzymes having an improved ability to specifically cleave a DNA member of a complex comprising DNA and RNA nucleic acid strands.

### BACKGROUND OF THE INVENTION

[0004] In molecular medicine, a simple and cost-effective method for direct and quantitative RNA detection would greatly facilitate the analysis of RNA viruses and the measurement of specific gene expression. Both of these issues are currently pressing problems in the field. Despite this need, few techniques have emerged that are truly direct. PCR-based detection assays require conversion of RNA to DNA by reverse transcriptase before amplification, introducing a variable that can compromise accurate quantification. Furthermore, PCR and other methods based on exponential amplification (e.g., NASBA) require painstaking containment measures to avoid cross-contamination, and have difficulty distinguishing small differences (e.g., 2 to 3-fold) in quantity. Other tests that directly examine RNA suffer from a variety of drawbacks, including time consuming autoradiography steps (e.g., RNase protection assays), or overnight reaction times (e.g., branched DNA assays). With over 1.5 million viral load measurements being performed in the U.S. every year, there is clearly an enormous potential for an inexpensive, rapid, high-throughput system for the quantitative measurement of RNA.

[0005] Techniques for direct, quantitative detection of mRNA are vital for monitoring expression of a number of different genes. In particular, levels of cytokine expression (e.g., interleukins and lymphokines) are being exploited as clinical measures of immune response in the progression of a wide variety of diseases (Van Deuren et al., J. Int. Fed. Clin. Chem., 5:216 [1993], Van Deuren et al., J. Inf. Dis., 169:157 [1994], Perenboom et al., Eur. J. Clin. Invest., 26:159 [1996], Guidotti et al., Immunity 4:25 [1996]) as well as in monitoring transplant recipients (Grant et al., Transplantation 62:910 [1996]). Additionally, the monitoring of viral load and identification of viral genotype have great clinical significance for individuals suffering viral infections by such pathogens as HIV or Hepatitis C virus (HCV). There is a high correlation between viral load (i.e., the absolute number of viral particles in the bloodstream) and time to progression to AIDS (Mellors et al., Science 272:1167 [1996], Saag et al., Nature Medicine 2:625 [1996]). For that reason, viral load, as measured by quantitative nucleic acid based testing, is becoming a standard monitoring procedure for evaluating the efficacy of treatment and the clinical status of HIV positive patients. It is thought to be essential to reduce viral load as early in the course of infection as possible and to evaluate viral levels on a regular basis. In the case of HCV, viral genotype has great clinical significance, with correlations to severity of liver disease and responsiveness to interferon therapy. Furthermore, because HCV cannot be grown in culture, it is only by establishing correlations between characteristics like viral genotype and clinical outcome that new antiviral treatments can be evaluated.

[0006] While the above mentioned methods have been serviceable for low throughput, research applications, or for limited clinical application, it is clear that large scale quantitative analysis of RNA readily adaptable to any genetic system will require a more innovative approach. An ideal direct detection method would combine the advantages of the direct detection assays (e.g., easy quantification and minimal risk of carry-over contamination) with the specificity provided by a dual oligonucleotide hybridization assay.

[0007] Many of the methods described above rely on hybridization alone to distinguish a target molecule from other nucleic acids. Although some of these methods can be highly sensitive, they often cannot quantitate and distinguish closely related mRNAs accurately, especially such RNAs expressed at different levels in the same sample. While the above-mentioned methods are serviceable for some purposes, a need exists for a technology that is particularly adept at distinguishing particular RNAs from closely related molecules.

### SUMMARY OF THE INVENTION

[0008] The present invention relates to novel enzymes designed for direct detection, characterization and quantitation of nucleic acids, particularly RNA. The present invention provides enzymes that recognize specific nucleic acid cleavage structures formed on a target RNA sequence and that cleave the nucleic acid cleavage structure in a site-specific manner to produce non-target cleavage products. The present invention provides enzymes having an improved ability to specifically cleave a DNA member of a complex comprising DNA and RNA nucleic acid strands.

[0009] For example, the present invention provides DNA polymerases that are altered in structure relative to the native DNA polymerases, such that they exhibit altered (e.g., improved) performance in detection assays based on the cleavage of a structure comprising nucleic acid (e.g., RNA). In particular, the altered polymerases of the present invention exhibit improved performance in detection assays based on the cleavage of a DNA member of a cleavage structure (e.g., an invasive cleavage structure) that comprises an RNA target strand.

[0010] The improved performance in a detection assay may arise from any one of, or a combination of several improved features. For example, in one embodiment, the enzyme of the present invention may have an improved rate of cleavage (k_{cat}) on a specific targeted structure, such that a larger amount of a cleavage product may be produced in a given time span. In another embodiment, the enzyme of the present invention may have a reduced activity or rate in the cleavage of inappropriate or non-specific structures. For example, in certain embodiments of the present invention, one aspect of improvement is that the differential between the detectable amount of cleavage of a specific structure and the detectable amount of cleavage of any alternative structures is increased. As such, it is within the scope of the present invention to provide an enzyme having a reduced rate of cleavage of a specific target structure compared to the rate of the native enzyme, and having a further reduced rate of cleavage of any alternative structures, such that the differential between the detectable amount of cleavage of the specific structure and the detectable amount of cleavage of any alternative structures is increased. However, the present invention is not limited to enzymes that have an improved differential.

[0011] In a preferred embodiment, the enzyme of the present invention is a DNA polymerase having an altered nuclease activity as described above, and also having altered synthetic activity, compared to that of any native DNA polymerase from which the enzyme has been derived. It is especially preferred that the DNA polymerase is altered such that it exhibits reduced synthetic activity as well as improved nuclease activity on RNA targets, compared to that of the native DNA polymerase. Enzymes and genes encoding enzymes having reduced synthetic activity have been described (See e.g., Kaiser et al., J. Biol. Chem., 274:21387 [1999], Lyamichev et al., Prot. Natl. Acad. Sci., 96:6143 [1999], U.S. Pat. Nos. 5,541,311, 5,614,402, 5,795,763 and U.S. patent application Ser. No. 08/758,314, incorporated herein by reference in their entireties). The present invention contemplates combined modifications, such that the resulting 5′ nucleases are without interfering synthetic activity, and have improved performance in RNA detection assays.

[0012] The present invention contemplates a DNA sequence encoding a DNA polymerase altered in sequence relative to the native sequence, such that it exhibits altered nuclease activity from that of the native DNA polymerase. For example, in one embodiment, the DNA sequence encodes an enzyme having an improved rate of cleavage (k_{cat}) on a specific targeted structure, such that a larger amount of a cleavage product may be produced in a given time span. In another embodiment, the DNA encodes an enzyme having a reduced activity or rate in the cleavage of inappropriate or non-specific structures. In certain embodiments, one aspect of improvement is that the differential between the detectable amount of cleavage of a specific structure and the detectable amount of cleavage of any alternative structures is increased. It is within the scope of the present invention to provide a DNA encoding an enzyme having a reduced rate of cleavage of a specific target structure compared to the rate of the native enzyme, and having a further reduced rate of cleavage of any alternative structures, such that the differential between the detectable amount of cleavage of the specific structure and the detectable amount of cleavage of any alternative structures is increased. However, the present invention is not limited to polymerases that have an improved differential.

[0013] In a preferred embodiment, the DNA sequence encodes a DNA polymerase having the altered nuclease activity described above, and also having altered synthetic activity, compared to that of any native DNA polymerase from which the improved enzyme is derived. It is especially preferred that the encoded DNA polymerase is altered such that it exhibits reduced synthetic activity as well as improved nuclease activity on RNA targets, compared to that of the native DNA polymerase.

[0014] It is not intended that the invention be limited by the nature of the alteration required to introduce altered nuclease activity. Nor is it intended that the invention be limited by the extent of either the alteration, or in the improvement observed. If the polymerase is also altered so as to be synthesis modified, it is not intended that the invention be limited by the polymerase activity of the modified or unmodified protein, or by the nature of the alteration to render the polymerase synthesis modified.

[0015] The present invention contemplates structure-specific nucleases from a variety of sources, including, but not limited to, mesophilic, psychrophilic, thermophilic, and hyperthermophilic organisms. The preferred structure-specific nucleases are thermostable. Thermostable structure-specific nucleases are contemplated as particularly useful in that they allow the INVADER assay (See e.g., U.S. Pat. Nos. 5,846,717, 5,985,557, 5,994,069, and 6,001,567 and PCT Publications WO 97/27214 and WO 98/42873, incorporated herein by reference in their entireties) to be operated near the melting temperature (Tₘ) of the downstream probe oligonucleotide, so that cleaved and uncleaved probes may cycle on and off the target during the course of the reaction. In one embodiment, the thermostable structure-specific enzymes are thermostable 5′ nucleases that are selected from the group comprising altered polymerases derived from the native polymerases of Thermus species, including, but not limited to, Thermus aquaticus, Thermus flavus, Thermus thermophilus, Thermus filiformus, and Thermus scotoductus. However, the invention is not limited to the use of thermostable 5′ nucleases. For example, certain embodiments of the present invention utilize short oligonucleotide probes that may cycle on and off of the target at low temperatures, allowing the use of non-thermostable enzymes.

[0016] In some preferred embodiments, the present invention provides a composition comprising an enzyme, wherein the enzyme comprises a heterologous functional domain, wherein the heterologous functional domain provides altered (e.g., improved) functionality in a nucleic acid cleavage assay. The present invention is not limited by the nature of the nucleic acid cleavage assay. For example, nucleic acid cleavage assays include any assay in which a nucleic acid is cleaved, directly or indirectly, in the presence of the enzyme. In certain preferred embodiments, the nucleic acid cleavage assay is an invasive cleavage assay.

[0017] In particularly preferred embodiments, the cleavage assay utilizes a cleavage structure having at least one RNA component. In another particularly preferred embodiment, the cleavage assay utilizes a cleavage structure having at least one RNA component, wherein a DNA member of the cleavage structure is cleaved.

[0018] In some preferred embodiments, the enzyme comprises a 5′ nuclease or a polymerase. In certain preferred embodiments, the 5′ nuclease comprises a thermostable 5′ nuclease. In other preferred embodiments, the polymerase is altered in sequence relative to a naturally occurring sequence of a polymerase such that it exhibits reduced DNA synthetic activity from that of the naturally occurring polymerase. In certain preferred embodiments, the polymerase comprises a thermostable polymerase (e.g., a polymerase from a Thermus species including, but not limited to, Thermus aquaticus, Thermus flavus, Thermus thermophilus, Thermus filiformus, and Thermus scotoductus).

[0019] The present invention is not limited by the nature of the altered functionality provided by the heterologous functional domain. Illustrative examples of alterations include, but are not limited to, enzymes where the heterologous functional domain comprises an amino acid sequence (e.g., one or more amino acids) that provides an improved nuclease activity, an improved substrate binding activity and/or improved background specificity in a nucleic acid cleavage assay.

[0020] The present invention is not limited by the nature of the heterologous functional domain. For example, in some embodiments, the heterologous functional domain comprises two or more amino acids from a polymerase domain of a polymerase (e.g., introduced into the enzyme by insertion of a chimeric functional domain or created by mutation). In certain preferred embodiment, at least one of the two or more amino acids is from a palm or thumb region of the polymerase domain. The present invention is not limited by the identity of the polymerase from which the two or more amino acids are selected. In certain preferred embodiments, the polymerase comprises Thermus thermophilus polymerase. In particularly preferred embodiments, the two or more amino acids are from amino acids 300-650 of SEQ ID NO:267.

[0021] The novel enzymes of the invention may be employed for the detection of target DNAs and RNAs including, but not limited to, target DNAs and RNAs comprising wild type and mutant alleles of genes, including, but not limited to, genes from humans, other animal, or plants that are or may be associated with disease or other conditions. In addition, the enzymes of the invention may be used for the detection of and/or identification of strains of microorganisms, including bacteria, fungi, protozoa, ciliates and viruses (and in particular for the detection and identification of viruses having RNA genomes, such as the Hepatitis C and Human Immunodeficiency viruses). For example, the present invention provides methods for cleaving a nucleic acid comprising providing: an enzyme of the present invention and a substrate nucleic acid; and exposing the substrate nucleic acid to the enzyme (e.g., to produce a cleavage product that may be detected).

[0022] In one embodiment, the present invention provides a thermostable 5′ nuclease having an amino acid sequence selected from the group comprising SEQ ID NOS:75, 77, 79, 81, 83, 85, 87, 89, 91, 93, 95, 97, 99, 101, 103, 106, 109, 112, 115, 118, 121, 124, 127, 130, 133, 136, 139, 142, 145, 148, 150, 153, 157, 160, 163, 166, 169, 172, 175, 178, 181, 184, 187, 190, 200, 202, 204, 206, 212, 214, 216, 218, 221, 226, 228, 230, 232, 234, 236, 239, 241, 243, 251, 259, 261, 263, and 265. In another embodiment, the 5′ nuclease is encoded by a DNA sequence selected from the group comprising of SEQ ID NOS:74, 76, 78, 80, 82, 84, 86, 88, 90, 92, 94, 96, 98, 100, 102, 105, 108, 111, 114, 117, 120, 123, 126, 129, 132, 135, 138, 141, 144, 147, 149, 152, 156, 159, 162, 165, 168, 171, 174, 177, 180, 183, 186, 189, 199, 201, 203, 205, 211, 213, 215, 217, 220, 225, 227, 229, 231, 233, 235, 238, 240, 242, 250, 258, 260, 262, and 264.

[0023] The present invention also provides a recombinant DNA vector comprising DNA having a nucleotide sequence encoding a 5′ nuclease, the nucleotide sequence selected from the group comprising SEQ ID NOS:74, 76, 78, 80, 82, 84, 86, 88, 90, 92, 94, 96, 98, 100, 102, 105, 108, 111, 114, 117, 120, 123, 126, 129, 132, 135, 138, 141, 144, 147, 149, 152, 156, 159, 162, 165, 168, 171, 174, 177, 180, 183, 186, 189, 199, 201, 203, 205, 211, 213, 215, 217, 220, 225, 227, 229, 231, 233, 235, 238, 240, 242, 250, 258, 260, 262, and 264. In a preferred embodiment, the invention provides a host cell transformed with a recombinant DNA vector comprising DNA having a nucleotide sequence encoding a structure-specific nuclease, the nucleotide selected from the group comprising sequence SEQ ID NOS:74, 76, 78, 80, 82, 84, 86, 88, 90, 92, 94, 96, 98, 100, 102, 105, 108, 111, 114, 117, 120, 123, 126, 129, 132, 135, 138, 141, 144, 147, 149, 152, 156, 159, 162, 165, 168, 171, 174, 177, 180, 183, 186, 189, 199, 201, 203, 205, 211, 213, 215, 217, 220, 225, 227, 229, 231, 233, 235, 238, 240, 242, 250, 258, 260, 262, and 264. The invention is not limited by the nature of the host cell employed. The art is well aware of expression vectors suitable for the expression of nucleotide sequences encoding structure-specific nucleases that can be expressed in a variety of prokaryotic and eukaryotic host cells. In a preferred embodiment, the host cell is an Escherichia coli cell.

[0024] The present invention provides a method of altering 5′ nuclease enzymes relative to native 5′ nuclease enzymes, such that they exhibit improved performance in detection assays based on the cleavage of a structure comprising RNA. In particular, the altered 5′ nucleases produced by the method of the present invention exhibit improved performance in detection assays based on the cleavage of a DNA member of a cleavage structure (e.g., an invasive cleavage structure) that comprises an RNA target strand. The improved 5′ nucleases resulting from the methods of the present invention may be improved in any of the ways discussed herein. Examples of processes for assessing improvement in any candidate enzyme are provided.

[0025] For example, the present invention provides methods for producing an altered enzyme with improved functionality in a nucleic acid cleavage assay comprising: providing an enzyme and a nucleic acid test substrate; introducing a heterologous functional domain into the enzyme to produce an altered enzyme; contacting the altered enzyme with the nucleic acid test substrate to produce cleavage products; and detecting the cleavage products. In some embodiments, the introduction of the heterologous functional domain comprises mutating one or more amino acids of the enzyme. In other embodiments, the introduction of the heterologous functional domain into the enzyme comprises adding a functional domain from a protein (e.g., another enzyme) into the enzyme (e.g., substituting functional domains by removing a portion of the enzyme sequence prior to adding the functional domain of the protein). In preferred embodiments, the nucleic acid test substrate comprises a cleavage structure. In particularly preferred embodiment, the cleavage structure comprises an RNA target nucleic acid. In yet other preferred embodiments, the cleavage structure comprises an invasive cleavage structure.

[0026] The present invention also provides a composition comprising a nucleic acid sequence of SEQ ID NO:279 or its complement. In some embodiments, the present invention further provides a vector comprising the nucleic acid sequence of SEQ ID NO:279. In some embodiments, the present invention further provides a host cell comprising a vector comprising the nucleic acid sequence of SEQ ID NO:279. In yet other embodiments, the present invention provides a composition comprising a polypeptide encoded by a nucleic acid comprising SEQ ID NO:279 or sequences that hybridize to the complement of SEQ ID NO:279 under stringent conditions. In some embodiments, the polypeptide comprises SEQ ID NO:280.

[0027] The present invention further provides a method for producing an altered enzyme with improved functionality in a nucleic acid cleavage assay comprising. For example, in some embodiments, the present invention provides a method, comprising providing a nucleic acid encoding a polypeptide of SEQ ID NO:280 and a nucleic acid test substrate; introducing one or more heterologous domains into the nucleic acid to produce an altered nucleic acid encoding an altered enzyme; contacting the altered enzyme with the nucleic acid test substrate to produce cleavage products; and detecting the cleavage products (e.g. comparing the cleavage products to cleavage product generated by contacting the test substrate with the polypeptide of SEQ ID NO:280).

[0028] The present invention also provides nucleic acid treatment kits. One preferred embodiment is a kit comprising a composition comprising at least one improved 5′ nuclease. Another preferred embodiment provides a kit comprising: a) a composition comprising at least one improved 5′ nuclease; and b) an INVADER oligonucleotide and a signal probe oligonucleotide. In some embodiments of the kits of the present invention, the improved 5′ nuclease is derived from a DNA polymerase from a eubacterial species. In further embodiments, the eubacterial species is a thermophile. In still further embodiments, the thermophile is of the genus Thermus. In still further embodiments, the thermophile is selected from the group consisting of Thermus aquaticus, Thermus flavus, Thermus thermophilus, Thermus filiformus, and Thermus scotoductus. In preferred embodiments, the improved 5′ nuclease is encoded by DNA selected from the group comprising SEQ ID NOS:74, 76, 78, 80, 82, 84, 86, 88, 90, 92, 94, 96, 98, 100, 102, 105, 108, 111, 114, 117, 120, 123, 126, 129, 132, 135, 138, 141, 144, 147, 149, 152, 156, 159, 162, 165, 168, 171, 174, 177, 180, 183, 186, 189, 199, 201, 203, 205, 211, 213, 215, 217, 220, 225, 227, 229, 231, 233, 235, 238, 240, 242, 250, 258, 260, 262, and 264. In yet other preferred embodiments, the kits further comprise reagents for detecting a nucleic acid cleavage product. In further preferred embodiments, the reagents for detecting a cleavage product comprise oligonucleotides for use in a subsequent invasive cleavage reaction (See e.g., U.S. Pat. No. 5,994,069). In particularly preferred embodiments, the reagents for the subsequent invasive cleavage reaction comprise a probe labeled with moieties that produce a fluorescence resonance energy transfer (FRET) effect.

### DESCRIPTION OF THE DRAWINGS

[0029] FIG. 1 shows a schematic representation of sequential invasive cleavage reactions. In step A, an upstream INVADER oligonucleotide and a downstream probe combine with a target nucleic acid strand to form a cleavage structure. In step B, the portion of the cleaved signal probe from A combines with a second target nucleic acid strand and a labeled signal probe to form a second cleavage structure. In step C, cleavage of the labeled second cleavage structure yields a detectable signal.

[0030] FIG. 2 shows schematic representations of several examples of invasive cleavage structures comprising RNA target strands (SEQ ID NO:9). Panel A depicts an INVADER oligonucleotide (SEQ ID NO:10) and probe (SEQ ID NO:11). Panel B depicts an INVADER oligonucleotide (SEQ ID NO: 12) and probe (SEQ ID NO: 11). Panel C depicts an INVADER oligonucleotide (SEQ ID NO:13) and probe (SEQ ID NO:13). Panel D depicts an INVADER oligonucleotide (SEQ ID NO: 13) and probe (SEQ ID NO: 14).

[0031] FIG. 3 shows schematic representations of two examples of structures that are not invasive cleavage structures labelled SEQ ID NOs:269-274.

[0032] FIG. 4 shows a schematic representation of a configuration of invasive cleavage that is useful for detection of target sequence variations. In A, an invasive cleavage structure having overlap between the two probes is formed, and the arrow indicates that it is cleavable by the enzymes of the present invention. In B, variation of the target sequence removes a region of complementarity to the downstream probe and eliminates the overlap. The absence of an arrow in panel B indicates a reduced rate of cleavage of this structure compared to that diagrammed in panel A.

[0033] FIG. 5 shows a diagram of the X-ray structure of a ternary complex of Klentaql with primer/template DNA in the polymerizing mode determined by Li et al. (Li et al., Protein Sci., 7:1116 [1998]). Without intending to represent precise borders between features of the physical form, the portions referred to in the text as the “fingers”, “thumb” and “palm” regions are loosely indicated by the circle, rectangle, and oval, respectively.

[0034] FIG. 6 shows a schematic diagram of the DNA polymerase gene from Thermus aquaticus. Restriction sites used in these studies are indicated above. The approximate regions encoding various structural or functional domains of the protein are indicated by double-headed arrows, below.

[0035] FIG. 7 shows a schematic diagram of the chimeric constructs comprising portions of the TaqPol gene and the TthPol gene. Open and shaded boxes denote TaqPol and TthPol sequences, respectively. The numbers correspond to the amino acid sequence of TaqPol. The 5′ nuclease and polymerase domains of TaqPol and the palm, thumb, and fingers regions of the polymerase domain are indicated. The abbreviations for the restrictions sites used for recombination are as follows: E, EcoRI; N, NotI; Bs, BstBI; D, NdeI; B, BamHI; and S, SalI.

[0036] FIG. 8 is a comparison of the nucleotide structure of the polymerase genes isolated from Thermus aquaticus (SEQ ID NO:1), Thermus flavus (SEQ ID NO:2) and Thermus thermophilus (SEQ ID NO:266); the consensus sequence (SEQ ID NO:7) is shown at the top of each row.

[0037] FIG. 9 is a comparison of the amino acid sequence of the polymerase isolated from Thermus aquaticus (SEQ ID NO:4), Thermus flavus (SEQ ID NO:5), and Thermus thermophilus (SEQ ID NO:267); the consensus sequence (SEQ ID NO:8) is shown at the top of each row.

[0038] FIG. 10 shows the sequences and proposed structures of substrates for the invasive signal amplification reaction with human IL-6 RNA target strand (SEQ ID NO: 17) and upstream probe (SEQ ID NO:15). The cleavage site of the downstream probe (SEQ ID NO:16) is indicated by an arrow. Sequence of the IL-6 DNA target strand (SEQ ID NO:18) is shown below.

[0039] FIG. 11 shows the image generated by a fluorescence imager showing the products of invasive cleavage assays using the indicated enzymes, and the IL-6 substrate of FIG. 10 having either a DNA target strand (A) or an RNA target strand (B).

[0040] FIG. 12 compares the cycling cleavage activities of Taq DN RX HT, Tth DN RX HT, and Taq-Tth chimerical enzymes with IL-6 substrate having an RNA target strand.

[0041] FIG. 13 shows a comparison of the amino acid sequences of the BstI-BamHI fragments of TaqPol (SEQ ID NO:19) and TthPol (SEQ ID NO:20). Pairs of similar amino acids are shaded with light gray. Aligned amino acids that have a charge difference are shaded with dark gray. The numbers correspond to the amino acid sequence of TaqPol. Amino acids of TaqPol changed to the corresponding amino acids of TthPol by site-directed mutagenesis are indicated by (+).

[0042] FIG. 14 compares the cycling cleavage activities of Taq DN RX HT, Taq-Tth chimerical enzymes, and chimerical enzymes having the indicated additional amino acid modifications, with IL-6 substrate having an RNA target strand.

[0043] FIG. 15 compares the cycling cleavage activities of Taq DN RX HT, Tth DN RX HT, and Taq DN RX HT having the indicated amino acid modifications, with IL-6 substrate having an RNA target strand.

[0044] FIG. 16 compares polymerization activities of TaqPol, TthPol, and Taq-Tth chimerical enzymes, and TaqPol having the indicated amino acid modifications.

[0045] FIG. 17 shows a diagram of the X-ray structure of a ternary complex of Klentaq1 with primer/template DNA in the polymerizing mode determined by Li et al (Li et al., Protein Sci., 7:1116 [1998]). Amino acids G418 and E507 are indicated.

[0046] FIGS. 18 A-D show schematic diagrams of examples of substrates that may be used to measure various cleavage activities of enzymes. The substrates may be labeled, for example, with a fluorescent dye and a quenching moiety for FRET detection, as shown, to facilitate detection and measurement. The substrates of 18A and 18B are invasive cleavage structures having RNA and DNA target strands, respectively. 18C shows an example of an X-structure, and 18D shows an example of a hairpin structure, both of which may be used to assess the activity of enzymes on alternative structures that may be present in invasive cleavage reactions.

[0047] FIG. 19 shows schematic diagrams of chimeric constructs comprising portions of the TaqPol gene and the TthPol gene. Open and shaded boxes denote TaqPol and TthPol sequences, respectively. The chimeras also include the DN, RX, and HT modifications. A table compares the cleavage activity of each protein on the indicated cleavage substrates.

[0048] FIG. 20A shows a schematic diagram for an RNA containing invasive cleavage substrate. The 5′ end of the target molecule (SEQ ID NO:27) is modified with biotin and blocked with streptavidin as described. The downstream probe (SEQ ID NO:26) with cleavage site is also shown. Panels B-D show analysis of the properties of the Taq DN RX HT G418K/E507Q mutant in cleavage of the shown substrate under conditions of varying reaction temperature, KCl concentration, and MgSO₄ concentration.

[0049] FIG. 21 shows schematic diagrams for model substrates used to test enzymes for invasive cleavage activity. The molecule shown in 21A provides a DNA target strand (SEQ ID NO:28), while the model shown in 21B provides an RNA containing target strand (SEQ ID NO:27). Both 21A and B show downstream probe SEQ ID NO:26.

[0050] FIG. 22 shows schematic diagrams for model substrates used to test enzymes for cleavage activity on alternative, non-invasive structures.

[0051] FIG. 23 shows a schematic diagram for a model substrate used to test enzymes for invasive cleavage activity.

[0052] FIG. 24 shows schematic diagrams for a model substrate used to test enzymes for invasive cleavage activity on an RNA or DNA target strands.

[0053] FIG. 25 compares the cycling cleavage activities of Tth DN RX HT, Taq 2M, TfiPol, Tsc Pol, and Tfi and Tsc-derived mutant enzymes.

[0054] FIG. 26 shows the nucleic acid sequence of SEQ ID NO:279.

[0055] FIG. 27 shows the polypeptide sequence of SEQ ID NO:280.

### GENERAL DESCRIPTION OF THE INVENTION

[0056] The INVADER technology (See e.g., U.S. Pat. Nos. 5,846,717, 5,985,557, 5,994,069, and 6,001,567 and PCT Publications WO 97/27214 and WO 98/42873, incorporated herein by reference in their entireties) provides a signal amplification system that can be applied to the detection and quantitation of specific nucleic acid sequences, including single point mutations and similar variants of mRNA. Further, because this technology does not rely exclusively on allele-specific hybridization, it is well suited for quantitating closely related RNAs in the same sample. The present invention provides improved enzymes and methods for creating enzymes for the INVADER assay-based detection of nucleic acids, particularly RNA nucleic acids. The present invention also provides kits for the performance of INVADER assays using the improved enzymes of the present invention.

[0057] The INVADER technology was developed for quantitative detection of DNA and RNA, without prior amplification of the target nucleic acid (Lyamichev et al., Nat. Biotechnol., 17:292 [1999]). In addition to its use for the quantitative measurement of specific nucleic acid sequences, high specificity provides the capability of detecting single base changes. The basis of the INVADER technology is the cleavage of DNA and RNA molecules at specific locations in response to structure rather than sequence. Cleavage is typically catalyzed by a 5′ nuclease enzyme. The 5′ nuclease enzymes recognize a precise structure that is formed when two oligonucleotide probes, an upstream INVADER probe and a downstream signal probe, hybridize in tandem to a nucleic acid target to generate the substrate complex (FIG. 1A). The high specificity of the INVADER technology arises from combining sequence-specific probe hybridization with structure-specific enzymatic cleavage. The substrate complex contains a feature that is important for precise enzyme recognition: an overlap between the hybridized oligonucleotides. To form an invasive structure, the 3′ end of the upstream INVADER oligonucleotide must overlap with the hybridized region of the signal probe by at least one base (Lyamichev et al., Nat. Biotechnol., 17:292 [1999]). This overlap may be created by a duplication of sequence between the 3′ portion of the upstream INVADER oligonucleotide and the 5′ portion of the target-complementary region of the downstream probe oligonucleotide. The region of sequence so duplicated may be as small as a single base. Regardless of the length of the duplicated sequence (i.e., the overlap) the 3′ terminal base of the upstream INVADER oligonucleotide need not be complementary to the target strand, and may be any nucleotide. In some embodiments, this terminal nucleotide may be replaced by a moiety having chemical features similar to a nucleotide such as a nucleotide analog or an organic ring compound (See e.g., U.S. Pat. No. 5,985,557). In an alternative embodiment, the overlap need not involve any duplication of sequence between the target-complementary regions of the two probes (Lyamichev et al., Nat. Biotechnol., 17:292 [1999] and U.S. Pat. No. 5,985,557). In this embodiment, the INVADER and signal probes have regions complementary to adjacent regions of the target that are contiguous and that do not overlap. When no sequence is shared, the 3′ end of the upstream INVADER oligonucleotide includes at least one additional nucleotide or nucleotide-like analog that is not complementary to the target strand (Lyamichev et al., Nat. Biotechnol., 17:292 [1999]). This can be referred to as a physical overlap, in contrast to a sequence overlap. An overlap of either type will satisfy the requirement for overlap that is the hallmark of the invasive cleavage of the INVADER assay. Several of these embodiments are shown schematically in FIG. 2. In contrast to the overlap configurations described above, if the probes have regions complementary to adjacent regions of the target that are contiguous and that do not overlap, and the 3′ end of the upstream oligonucleotide does not have any additional base or moiety, the invasive structure is not formed (FIG. 3A). Even the presence of one or more additional bases on the 5′ end of the downstream oligonucleotide that are not complementary to the target strand will not create the requisite overlap. This latter structure (FIG. 3B), as is described in U.S. Pat. No. 5,874,283 is not an “invasive cleavage,” although such structures find use in certain embodiments of the present invention.

[0058] Some 5′ nucleases may not require an upstream oligonucleotide to be active in a cleavage reaction. Although cleavage may be slower without the upstream oligonucleotide, it may still occur (Lyamichev et al., Science 260:778 [1993], Kaiser et al., J. Biol. Chem., 274:21387 [1999]). When a DNA strand is the template or target strand to which probe oligonucleotides are hybridized, the 5′ nucleases derived from DNA polymerases and some flap endonucleases (FENs), such as that from Methanococcus jannaschii, can cleave quite well without an upstream oligonucleotide providing an overlap (Lyamichev et al., Science 260:778 [1993], Kaiser et al., J. Biol. Chem., 274:21387 [1999], and U.S. Pat. No. 5,843,669, herein incorporated by reference in its entirety). Other FENs, such as those from Archeaoglobus fulgidus (Afu) and Pyrococcus furiosus (Pfu), cleave an overlapped structure on a DNA target at so much greater a rate than they do a non-overlapping structure (i.e., either missing the upstream oligonucleotide or having a non-overlapping upstream oligonucleotide) that they can be viewed as having an essentially absolute requirement for the overlap (Lyamichev et al., Nat. Biotechnol., 17:292 [1999], Kaiser et al., J. Biol. Chem., 274:21387 [1999]). When an RNA target is hybridized to DNA oligonucleotide probes to form a cleavage structure, many FENs cleave the downstream DNA probe poorly, regardless of the presence of an overlap. On such an RNA-containing structure, the 5′ nucleases derived from DNA polymerases have a strong requirement for the overlap, and are essentially inactive in its absence.

[0059] Performing the INVADER assay under conditions that have a tight requirement for an overlap (e.g., using the Afu FEN for DNA target detection or the 5′ nuclease of Tth DNA polymerase for RNA target detection) provides a superior means of detecting single nucleotide or other sequence variations. In one embodiment, the signal probe is selected such that the target base suspected of varying is positioned at the 5′ end of the target-complementary region of this probe. The upstream INVADER oligonucleotide is positioned to provide a single base of overlap. If the target and the signal probe are complementary at the base in question, the overlap forms and cleavage can occur. This embodiment is diagrammed in FIG. 4A. However, if the target does not complement the probe at this position, that base in the probe becomes part of a non-complementary 5′ arm, no overlap between the probes exists, and cleavage is suppressed. This embodiment is diagrammed in FIG. 4B. In any of the aforementioned embodiments, the downstream probe may optionally include a region that is not complementary to the target. In a preferred embodiment, this non target-complementary region is on the 5′ end of the probe and produces an unpaired 5′ flap when the signal probe is hybridized to the target. Upon cleavage by a CLEAVASE enzyme, a released 5′ flap can be incorporated into a subsequent INVADER reaction for further amplification of the signal (See e.g., U.S. Pat. No. 5,994,069 and PCT Publication WO 98/42873, incorporated herein by reference in their entireties). One way it may be used is as an INVADER oligonucleotide, which may combine with a provided secondary target and a secondary probe. Upon hybridization of the 5′ flap released by the CLEAVASE enzyme in the first invasive cleavage reaction, a secondary invasive structure complex is completed, so that it may be recognized by the CLEAVASE enzyme and the secondary probe oligonucleotide may be cleaved (Kwiatkowski et al., Molec. Diagn., 4:353 [1999]), FIG. 1.

[0060] INVADER assays often use thermostable CLEAVASE enzymes, allowing reactions to be operated near the melting temperature (Tₘ) of the downstream probe oligonucleotide, so that cleaved and uncleaved probes cycle on and off the target during the course of the reaction. In a preferred embodiment, a longer INVADER oligonucleotide may not readily cycle. Each time a full-length probe binds to the target in the presence of the INVADER oligonucleotide it can be cleaved, resulting in an accumulation of cleavage product that is both highly specific for the sequence being detected, and that is generally proportional with respect to both time and target concentration. The target is generally the limiting component in an invasive cleavage, since the INVADER and signal probe oligonucleotides are generally supplied in molar excess. In a second linked invasive cleavage, it is the component created in the first cleavage reaction (e.g., a released 5′ flap) that is limiting. When two such cleavage reactions are performed sequentially, the signal from the composite reaction accumulates linearly with respect to the amount of target nucleic acid while the reaction sequence results in a tremendous increase in signal amplification (Kwiatkowski et al., Molec. Diagn., 4:353 [1999]).

[0061] Several of the 5′ nuclease domains of eubacterial Pol A DNA polymerases and structurally homologous DNA repair proteins, called flap endonucleases (FENs) can function to cleave the secondary structure formed between the INVADER and signal probe oligonucleotides (Kaiser et al., J. Biol. Chem., 274:21387 [1999], Xu et al., J. Biol. Chem., published online as 10.1074/jbc.M909135199 at wwwjbc.org/pips/pips.2.shtml, May 9, 2000). Both classes of enzymes contain a putative helix-hairpin-helix (HhH) DNA binding motif important for sequence independent, structure-based recognition of DNA (Doherty et al., Nucl. Acid. Res., 24:2488 [1996]). This type of DNA binding motif is suitable for assays performed on DNA targets, but can be problematic for assays with RNA targets, resulting in lower assay sensitivity. New enzymes having improved recognition of the invasive cleavage structure formed on an RNA target strand would vastly improve the performance of the INVADER assay in the detection and quantitation of RNA targets.

[0062] A number of enzyme improvements related to 5′ nucleases and DNA polymerases have been described. For example, DNA polymerases having altered 5′ nuclease activity, or lacking 5′ nuclease activity altogether have been described (U.S. Pat. Nos. 5,466,591 and 5,795,762, each of which is incorporated herein by reference in its entirety). These patents relate to thermostable DNA polymerases that exhibit a different level of 5′ to 3′ exonuclease activity than their respective native polymerases. In some embodiments, particular conserved amino acid domains in thermostable DNA polymerases are mutated or deleted to alter the 5′ to 3′ exonuclease activity of the polymerases.

[0063] DNA polymerases altered relative to the native polymerases such that they exhibit altered DNA synthetic activity have been described (Kaiser et al., J. Biol. Chem., 274:21387 [1999], Lyamichev et al., Proc. Natl. Acad. Sci., 96:6143 [1999], U.S. Pat. Nos. 5,541,311, 5,614,402, 5,795,763 and U.S. patent application Ser. No. 08/758,314, incorporated herein by reference in their entireties). In preferred embodiments, these DNA polymerases are altered such that they exhibit reduced synthetic activity compared to that of the native DNA polymerase. In this respect, enzymes have been created that are predominantly 5′ nucleases and are capable of cleaving nucleic acids in a structure-specific manner in the absence of interfering synthetic activity. The alterations made in these polymerases were not selected with respect to their effect of the cleavage of structures comprising RNA.

[0064] DNA polymerases having the ability to use RNA as a template strand, known as reverse transcriptases, are usually associated with an RNase activity that specifically cleaves RNA basepaired in a heteroduplex with a DNA strand. Such RNase activity is generally termed RNase H. Altered reverse transcriptases that have this RNase H activity removed have been described (See e.g., U.S. Pat. No. 5,244,797, incorporated herein by reference in its entirety). This patent relates to a gene that encodes reverse transcriptase having DNA polymerase activity and little or no RNase H activity. The invention also relates to a method of producing cDNA from mRNA using the reverse transcriptase. This patent does not describe enzymes having improved ability to cleave a DNA member of a structure comprising DNA and RNA strands, nor does it relate to enzymes having improved performance in detection assays based on the cleavage of a DNA member of a structure that comprises an RNA target strand.

[0065] Thermostable RNase H enzymes have been described (e.g., U.S. Pat. Nos. 5,268,289, 5,459,055 and 5,500,370, incorporated herein by reference in their entireties). These thermostable enzymes cleave the RNA member of a heteroduplex comprising DNA and RNA strands. These patents do not describe enzymes having improved ability to cleave a DNA member of a structure comprising DNA and RNA strands, nor do they relate to enzymes having improved performance in detection assays based on the cleavage of a DNA member of an invasive structure that comprises an RNA target strand.

[0066] There remains a need for enzymes having an improved ability to cleave DNA members of structures comprising RNA and DNA strands. In particular, there remains a need for thermostable enzymes having improved performance in detection assays based on the cleavage of DNA members of invasive complexes comprising an RNA target strand.

### DEFINITIONS

[0067] To facilitate an understanding of the present invention, a number of terms and phrases are defined below:

[0068] As used herein, the term “functional domain” refers to a region, or a part of a region, of a protein (e.g., an enzyme) that provides one or more functional characteristic of the protein. For example, a functional domain of an enzyme may provide, directly or indirectly, one or more activities of the enzyme including, but not limited to, substrate binding capability and catalytic activity. A functional domain may be characterized through mutation of one or more amino acids within the functional domain, wherein mutation of the amino acid(s) alters the associated functionality (as measured empirically in an assay) thereby indicating the presence of a functional domain.

[0069] As used herein, the term “heterologous functional domain” refers to a protein functional domain that is not in its natural environment. For example, a heterologous functional domain includes a functional domain from one enzyme introduced into another enzyme. A heterologous functional domain also includes a functional domain native to a protein that has been altered in some way (e.g., mutated, added in multiple copies, etc.). A heterologous functional domain may comprise a plurality of contiguous amino acids or may include two or more distal amino acids are amino acids fragments (e.g., two or more amino acids or fragments with intervening, non-heterologous, sequence). Heterologous functional domains are distinguished from endogenous functional domains in that the heterologous amino acid(s) are joined to amino acid sequences that are not found naturally associated with the amino acid sequence in nature or are associated with a portion of a protein not found in nature.

[0070] As used herein, the term “heterologous domain” refers to a refers to a region of a protein (e.g., an enzyme) that is not in its natural environment. For example, a heterologous domain includes a domain from one enzyme introduced into another enzyme. A heterologous domain also includes a domain native to a protein that has been altered in some way (e.g., mutated, added in multiple copies, etc.). A heterologous domain may comprise a plurality of contiguous amino acids or may include two or more distal amino acids are amino acids fragments (e.g., two or more amino acids or fragments with intervening, non-heterologous, sequence). Heterologous domains are distinguished from endogenous domains in that the heterologous amino acid(s) are joined to amino acid sequences that are not found naturally associated with the amino acid sequence in nature or are associated with a portion of a protein not found in nature.

[0071] As used herein, the term “altered functionality in a nucleic acid cleavage assay” refers to a characteristic of an enzyme that has been altered in some manner to differ from its natural state (e.g., to differ from how it is found in nature). Alterations include, but are not limited to, addition of a heterologous functional domain (e.g., through mutation or through creation of chimeric proteins). In some embodiments, the altered characteristic of the enzyme may be one that improves the performance of an enzyme in a nucleic acid cleavage assay. Types of improvement include, but are not limited to, improved nuclease activity (e.g., improved rate of reaction), improved substrate binding (e.g., increased or decreased binding of certain nucleic acid species [e.g., RNA or DNA] that produces a desired outcome [e.g., greater specificity, improved substrate turnover, etc.]), and improved background specificity (e.g., less undesired product is produced). The present invention is not limited by the nucleic cleavage assay used to test improved functionality. However, in some preferred embodiments of the present invention, an invasive cleavage assay is used as the nucleic acid cleavage assay. In certain particularly preferred embodiments, an invasive cleavage assay utilizing an RNA target is used as the nucleic acid cleavage assay.

[0072] The terms “signal oligonucleotide” and “signal probe” are used interchangeably, and refer to a member of a cleavage structure that is cleaved by a cleavage agent. In an “invasive cleavage structure,” the signal probe may be referred to as the “downstream probe” in a complex in that, with the exception of its overlapping portion, it is largely 3′ of an INVADER oligonucleotide within the complex. On the target strand, the hybridization site of a signal probe is said to be upstream of the hybridization site of an INVADER oligonucleotide.

[0073] The terms “INVADER” oligonucleotide or probe and “invasive” oligonucleotide or probe may be used interchangeably, and refer to a member of an invasive cleavage structure that hybridizes to a target nucleic acid strand and that overlaps the 5′ end of a signal probe. In an invasive cleavage structure, the INVADER oligonucleotide may be referred to as the upstream oligonucleotide or probe in the complex in that, with the exception of its overlapping portion, it is largely 5′ of a signal probe within the complex. On the target strand, the hybridization site of an INVADER oligonucleotide is downstream of the hybridization site of a signal probe.

[0074] The term “invasive cleavage structure” refers to a cleavage structure formed by the hybridization of two probes to a target nucleic acid, wherein the upstream probe overlaps the downstream probe by at least one base.

[0075] The term “DNA polymerase” as used herein refers to a protein that is encoded by a gene that is derived from the gene for a naturally occurring enzyme, said naturally occurring enzyme having nucleic acid synthetic activity. In some embodiments, the gene for the DNA polymerase is altered relative to the gene for the naturally occurring enzyme, such that the DNA polymerase lacks or has reduced synthetic activity.

[0076] The term “synthetic activity” refers to the ability of an enzyme to catalyze DNA synthesis by addition of deoxyribonucleotide or deoxyribonucletide analog units to a DNA chain using DNA or RNA as a template.

[0077] The term “target-complementary” refers to feature of a nucleic acid or a portion of an nucleic acid, said feature being that it is complementary to a target nucleic acid.

[0078] The terms “RNA-dependent” and “DNA-dependent”, when used with reference to an enzymatic activity, refer to activity that occurs in response to the presence of an RNA or DNA target strand, respectively. A single enzyme may possess both types of activities and the presence of one type of activity does not imply the absence of any other activity. For example, description of an enzyme as having RNA-dependent 5′ nuclease activity is not meant to indicate the absence of a DNA-dependent 5′ nuclease activity, or any other activity. Similarly, an enzyme having a DNA-dependent activity may also have RNA-dependent and other activities.

[0079] The terms “target” and “template” are used interchangeably, and refer to a nucleic acid to be detected or analyzed. In some embodiments, the target is a nucleic acid to which one or more oligonucleotides or probes are hybridized. In a cleavage embodiment, one or more oligonucleotides may hybridize to form a cleavage structure, the formation of which may be used for detection or analysis of said target nucleic acid. The target nucleic acids include but are not limited to, single and double stranded DNA or RNA, modified nucleic acids (e.g., methylated nucleic acids), chimeric nucleic acids, peptide nucleic acids and the like. “Nucleic acid molecule” refers to any nucleic acid containing molecule. The term encompasses sequences that include base analogs of DNA and RNA including, but not limited to, 4-acetylcytosine, 8-hydroxy-N6-methyladenosine, aziridinylcytosine, pseudoisocytosine, 5-(carboxyhydroxylmethyl) uracil, 5-fluorouracil, 5-bromouracil, 5-carboxymethylaminomethyl-2-thiouracil, 5-carboxymethylaminomethyluracil, dihydrouracil, inosine, N6-isopentenyladenine, 1-methyladenine, 1-methylpseudouracil, 1-methylguanine, 1-methylinosine, 2,2-dimethylguanine, 2-methyladenine, 2-methylguanine, 3-methylcytosine, 5-methylcytosine, N6-methyladenine, 7-methylguanine, 5-methylaminomethyluracil, 5-methoxyaminomethyl-2-thiouracil, beta-D-mannosylqueosine, 5′-methoxycarbonyhnethyluracil, 5-methoxyuracil, 2-methylthio-N6-isopentenyladenine, uracil-5-oxyacetic acid methylester, uracil-5-oxyacetic acid, oxybutoxosine, pseudouracil, queosine, 2-thiocytosine, 5-methyl-2-thiouracil, 2-thiouracil, 4-thiouracil, 5-methyluracil, N-uracil-5-oxyacetic acid methylester, uracil-5-oxyacetic acid, pseudouracil, queosine, 2-thiocytosine, and 2,6-diaminopurine.

[0080] The term “overlap” as used herein in reference to cleavage structures, refers to a feature of an invasive cleavage structure, said feature being that the 3′ end of an upstream INVADER oligonucleotide overlaps with the hybridized region of the signal probe by at least one base. An overlap may be created by a duplication of sequence between the 3′ portion of the upstream INVADER oligonucleotide and the 5′ portion of the target-complementary region of the downstream probe oligonucleotide. The region of sequence so duplicated may be as small as a single base. Regardless of the length of the duplicated sequence (i.e., the overlap) the 3′ terminal base of the upstream INVADER oligonucleotide need not be complementary to the target strand, and may be any nucleotide. In some embodiments, this terminal nucleotide may be replaced by a moiety having chemical features similar to a nucleotide such as a nucleotide analog or an aromatic ring compound. Indeed, any chemical moiety that provides an overlap and promotes efficient invasive cleavage is contemplated. In an alternative embodiment, the overlap need not involve any duplication of sequence between the target-complementary regions of the two probes (Lyamichev et al., Nat. Biotechnol., 17:292 [1999], U.S. Pat. No. 5,985,557). In this embodiment, the INVADER and signal probes have regions complementary to adjacent regions of the target that are contiguous and that do not overlap. When no sequence is shared, the 3′ end of the upstream INVADER oligonucleotide includes at least one additional nucleotide or nucleotide-like analog that is not complementary to the target strand. This can be referred to as a physical overlap, in contrast to a sequence overlap. An overlap of either type will satisfy the requirement for overlap of the invasive cleavage of the INVADER assay.

[0081] As used herein, the terms “N-terminal” and “C-terminal” in reference to polypeptide sequences refer to regions of polypeptides including portions of the N-terminal and C-terminal regions of the polypeptide, respectively. A sequence that includes a portion of the N-terminal region of polypeptide includes amino acids predominantly from the N-terminal half of the polypeptide chain, but is not limited to such sequences. For example, an N-terminal sequence may include an interior portion of the polypeptide sequence including bases from both the N-terminal and C-terminal halves of the polypeptide. The same applies to C-terminal regions. One example of such a sequence if shown in FIG. 6, wherein the “polymerase domain” may be referred to a C-terminal region of the polypeptide even though it contains amino acids that are part of the N-terminal half of the polypeptide. N-terminal and C-terminal regions may, but need not, include the amino acid defining the ultimate N-terminal and C-terminal ends of the polypeptide, respectively.

[0082] As used herein, the terms “complementary” or “complementarity” are used in reference to polynucleotides (i.e., a sequence of nucleotides such as an oligonucleotide or a target nucleic acid) related by the base-pairing rules. For example, for the sequence “A-G-T,” is complementary to the sequence “T-C-A.” Complementarity may be “partial,” in which only some of the nucleic acids' bases are matched according to the base pairing rules. Or, there may be “complete” or “total” complementarity between the nucleic acids. The degree of complementarity between nucleic acid strands has significant effects on the efficiency and strength of hybridization between nucleic acid strands. This is of particular importance in amplification reactions, as well as detection methods which depend upon binding between nucleic acids.

[0083] The term “homology” refers to a degree of identity. There may be partial homology or complete homology. A partially identical sequence is one that is less than 100% identical to another sequence.

[0084] As used herein, the term “hybridization” is used in reference to the pairing of complementary nucleic acids. Hybridization and the strength of hybridization (i.e., the strength of the association between the nucleic acids) is impacted by such factors as the degree of complementary between the nucleic acids, stringency of the conditions involved, the Tₘ of the formed hybrid, and the G:C ratio within the nucleic acids.

[0085] As used herein, the term “Tₘ” is used in reference to the “melting temperature.” The melting temperature is the temperature at which a population of double-stranded nucleic acid molecules becomes half dissociated into single strands. The equation for calculating the Tₘ of nucleic acids is well known in the art. As indicated by standard references, a simple estimate of the Tₘ value may be calculated by the equation: Tₘ=81.5+0.41(% G+C), when a nucleic acid is in aqueous solution at 1 M NaCl (See e.g., Anderson and Young, Quantitative Filter Hybridization, in Nucleic Acid Hybridization (1985). Other references include more sophisticated computations which take structural as well as sequence characteristics into account for the calculation of Tₘ.

[0086] As used herein the term “stringency” is used in reference to the conditions of temperature, ionic strength, and the presence of other compounds, under which nucleic acid hybridizations are conducted. With “high stringency” conditions, nucleic acid base pairing will occur only between nucleic acid fragments that have a high frequency of complementary base sequences. Thus, conditions of “weak” or “low” stringency are often required when it is desired that nucleic acids which are not completely complementary to one another be hybridized or annealed together. For example, in some embodiments, “high stringency conditions” when used in reference to nucleic acid hybridization comprise conditions equivalent to binding or hybridization at 42° C. in a solution consisting of 5×SSPE (43.8 g/l NaCl, 6.9 g/l NaH₂PO₄ H₂O and 1.85 g/l EDTA, pH adjusted to 7.4 with NaOH), 0.5% SDS, 5× Denhardt's reagent and 100 μg/ml denatured salmon sperm DNA followed by washing in a solution comprising 0.1× SSPE, 1.0% SDS at 42° C. when a probe of about 500 nucleotides in length is employed. In some embodiments, “medium stringency conditions” when used in reference to nucleic acid hybridization comprise conditions equivalent to binding or hybridization at 42° C. in a solution consisting of 5× SSPE (43.8 g/l NaCl, 6.9 g/l NaH₂PO₄ H₂O and 1.85 g/l EDTA, pH adjusted to 7.4 with NaOH), 0.5% SDS, 5× Denhardt's reagent and 100 μg/ml denatured salmon sperm DNA followed by washing in a solution comprising 1.0× SSPE, 1.0% SDS at 42° C. when a probe of about 500 nucleotides in length is employed. In some embodiments, “low stringency conditions” comprise conditions equivalent to binding or hybridization at 42° C. in a solution consisting of 5× SSPE (43.8 g/l NaCl, 6.9 g/l NaH₂PO₄ H₂O and 1.85 g/l EDTA, pH adjusted to 7.4 with NaOH), 0.1% SDS, 5× Denhardt's reagent [50× Denhardt's contains per 500 ml: 5 g Ficoll (Type 400, Pharamcia), 5 g BSA (Fraction V; Sigma)] and 100 μg/ml denatured salmon sperm DNA followed by washing in a solution comprising 5× SSPE, 0.1% SDS at 42° C. when a probe of about 500 nucleotides in length is employed.

[0087] The term “gene” refers to a DNA sequence that comprises control and coding sequences necessary for the production of a polypeptide or precursor. The polypeptide can be encoded by a full length coding sequence or by any portion of the coding sequence so long as the desired enzymatic activity is retained.

[0088] The term “wild-type” refers to a gene or gene product which has the characteristics of that gene or gene product when isolated from a naturally occurring source. A wild-type gene is that which is most frequently observed in a population and is thus arbitrarily designed the “normal” or “wild-type” form of the gene. In contrast, the term “modified” or “mutant” refers to a gene or gene product which displays modifications in sequence and or functional properties (i.e., altered characteristics) when compared to the wild-type gene or gene product. It is noted that naturally-occurring mutants can be isolated; these are identified by the fact that they have altered characteristics when compared to the wild-type gene or gene product.

[0089] The term “recombinant DNA vector” as used herein refers to DNA sequences containing a desired coding sequence and appropriate DNA sequences necessary for the expression of the operably linked coding sequence in a particular host organism. DNA sequences necessary for expression in prokaryotes include a promoter, optionally an operator sequence, a ribosome binding site and possibly other sequences. Eukaryotic cells are known to utilize promoters, polyadenlyation signals and enhancers.

[0090] The term “oligonucleotide” as used herein is defined as a molecule comprising two or more deoxyribonucleotides or ribonucleotides, preferably at least 5 nucleotides, more preferably at least about 10-15 nucleotides and more preferably at least about 15 to 30 nucleotides. The exact size will depend on many factors, which in turn depends on the ultimate function or use of the oligonucleotide. The oligonucleotide may be generated in any manner, including chemical synthesis, DNA replication, reverse transcription, or a combination thereof.

[0091] Because mononucleotides are reacted to make oligonucleotides in a manner such that the 5′ phosphate of one mononucleotide pentose ring is attached to the 3′ oxygen of its neighbor in one direction via a phosphodiester linkage, an end of an oligonucleotide is referred to as the “5′ end” if its 5′ phosphate is not linked to the 3′ oxygen of a mononucleotide pentose ring and as the “3′ end” if its 3′ oxygen is not linked to a 5′ phosphate of a subsequent mononucleotide pentose ring. As used herein, a nucleic acid sequence, even if internal to a larger oligonucleotide, also may be said to have 5′ and 3′ ends. A first region along a nucleic acid strand is said to be upstream of another region if the 3′ end of the first region is before the 5′ end of the second region when moving along a strand of nucleic acid in a 5′ to 3′ direction.

[0092] When two different, non-overlapping oligonucleotides anneal to different regions of the same linear complementary nucleic acid sequence, and the 3′ end of one oligonucleotide points towards the 5′ end of the other, the former may be called the “upstream” oligonucleotide and the latter the “downstream” oligonucleotide.

[0093] The term “primer” refers to an oligonucleotide which is capable of acting as a point of initiation of synthesis when placed under conditions in which primer extension is initiated. An oligonucleotide “primer” may occur naturally, as in a purified restriction digest or may be produced synthetically.

[0094] A primer is selected to be “substantially” complementary to a strand of specific sequence of the template. A primer must be sufficiently complementary to hybridize with a template strand for primer elongation to occur. A primer sequence need not reflect the exact sequence of the template. For example, a non-complementary nucleotide fragment may be attached to the 5′ end of the primer, with the remainder of the primer sequence being substantially complementary to the strand. Non-complementary bases or longer sequences can be interspersed into the primer, provided that the primer sequence has sufficient complementarity with the sequence of the template to hybridize and thereby form a template primer complex for synthesis of the extension product of the primer.

[0095] “Hybridization” methods involve the annealing of a complementary sequence to the target nucleic acid (the sequence to be detected; the detection of this sequence may be by either direct or indirect means). The ability of two polymers of nucleic acid containing complementary sequences to find each other and anneal through base pairing interaction is a well-recognized phenomenon. The initial observations of the “hybridization” process by Marmur and Lane, Proc. Natl. Acad. Sci. USA 46:453 (1960) and Doty et al., Proc. Natl. Acad. Sci. USA 46:461 (1960) have been followed by the refinement of this process into an essential tool of modern biology.

[0096] With regard to complementarity, it is important for some diagnostic applications to determine whether the hybridization represents complete or partial complementarity. For example, where it is desired to detect simply the presence or absence of pathogen DNA (such as from a virus, bacterium, fungi, mycoplasma, protozoan) it is only important that the hybridization method ensures hybridization when the relevant sequence is present; conditions can be selected where both partially complementary probes and completely complementary probes will hybridize. Other diagnostic applications, however, may require that the hybridization method distinguish between partial and complete complementarity. It may be of interest to detect genetic polymorphisms. For example, human hemoglobin is composed, in part, of four polypeptide chains. Two of these chains are identical chains of 141 amino acids (alpha chains) and two of these chains are identical chains of 146 amino acids (beta chains). The gene encoding the beta chain is known to exhibit polymorphism. The normal allele encodes a beta chain having glutamic acid at the sixth position. The mutant allele encodes a beta chain having valine at the sixth position. This difference in amino acids has a profound (most profound when the individual is homozygous for the mutant allele) physiological impact known clinically as sickle cell anemia. It is well known that the genetic basis of the amino acid change involves a single base difference between the normal allele DNA sequence and the mutant allele DNA sequence.

[0097] The complement of a nucleic acid sequence as used herein refers to an oligonucleotide which, when aligned with the nucleic acid sequence such that the 5′ end of one sequence is paired with the 3′ end of the other, is in “antiparallel association.” Certain bases not commonly found in natural nucleic acids may be included in the nucleic acids of the present invention and include, for example, inosine and 7-deazaguanine. Complementarity need not be perfect; stable duplexes may contain mismatched base pairs or unmatched bases. Those skilled in the art of nucleic acid technology can determine duplex stability empirically considering a number of variables including, for example, the length of the oligonucleotide, base composition and sequence of the oligonucleotide, ionic strength and incidence of mismatched base pairs.

[0098] The term “label” as used herein refers to any atom or molecule which can be used to provide a detectable (preferably quantifiable) signal, and which can be attached to a nucleic acid or protein. Labels may provide signals detectable by fluorescence, radioactivity, colorimetry, gravimetry, X-ray diffraction or absorption, magnetism, enzymatic activity, and the like. A label may be a charged moiety (positive or negative charge) or alternatively, may be charge neutral.

[0099] The term “cleavage structure” as used herein, refers to a structure which is formed by the interaction of at least one probe oligonucleotide and a target nucleic acid to form a complex having at least one region of base pairing before the probe and target, the resulting structure being cleavable by a cleavage agent, including but not limited to an enzyme. The cleavage structure is a substrate for specific cleavage by the cleavage agent, in contrast to a nucleic acid molecule which is a substrate for non-specific cleavage by agents such as phosphodiesterases which cleave nucleic acid molecules without regard to secondary structure (i.e., no formation of a duplexed structure is required).

[0100] The terms “cleavage means” and “cleavage agent” as used herein refer to any agent which is capable of cleaving a cleavage structure, including but not limited to enzymes (e.g., polymerases and flap endonucleases). The cleavage means may include native polymerases having 5′ nuclease activity (e.g., Taq DNA polymerase, E. coli DNA polymerase I) and, more specifically, modified polymerases having 5′ nuclease but lacking synthetic activity. “Structure-specific nucleases” or “structure-specific enzymes” are enzymes which recognize specific secondary structures in a nucleic molecule and cleave these structures. The cleavage means of the invention cleave a nucleic acid molecule in response to the formation of cleavage structures; it is not necessary that the cleavage means cleave the cleavage structure at any particular location within the cleavage structure.

[0101] The cleavage means is not restricted to enzymes having solely 5′ nuclease activity. The cleavage means may include nuclease activity provided from a variety of sources including, but not limited to, the CLEAVASE enzymes, the FEN-1 endonucleases (including RAD2 and XPG proteins), Taq DNA polymerase and E. coli DNA polymerase I.

[0102] The term “thermostable” when used in reference to an enzyme, such as a 5′ nuclease, indicates that the enzyme is functional or active (i.e., can perform catalysis) at an elevated temperature, e.g., at about 55° C. or higher.

[0103] The term “cleavage products” as used herein, refers to products generated by the reaction of a cleavage means with a cleavage structure (i.e., the treatment of a cleavage structure with a cleavage means).

[0104] The term “non-target cleavage product” refers to a product of a cleavage reaction which is not derived from the target nucleic acid. As discussed above, in the methods of the present invention, cleavage of the cleavage structure occurs within the probe oligonucleotide. The fragments of the probe oligonucleotide generated by this target nucleic acid-dependent cleavage are “non-target cleavage products.”

[0105] The term “substantially single-stranded” when used in reference to a nucleic acid substrate means that the substrate molecule exists primarily as a single strand of nucleic acid in contrast to a double-stranded substrate which exists as two strands of nucleic acid which are held together by inter-strand base pairing interactions.

[0106] The term “sequence variation” as used herein refers to differences in nucleic acid sequence between two nucleic acids. For example, a wild-type structural gene and a mutant form of this wild-type structural gene may vary in sequence by the presence of single base substitutions and/or deletions or insertions of one or more nucleotides. These two forms of the structural gene are said to vary in sequence from one another. A second mutant form of the structural gene may exist. This second mutant form is said to vary in sequence from both the wild-type gene and the first mutant form of the gene.

[0107] The term “liberating” as used herein refers to the release of a nucleic acid fragment from a larger nucleic acid fragment, such as an oligonucleotide, by the action of a 5′ nuclease such that the released fragment is no longer covalently attached to the remainder of the oligonucleotide.

[0108] The term “Kₘ” as used herein refers to the Michaelis-Menten constant for an enzyme and is defined as the concentration of the specific substrate at which a given enzyme yields one-half its maximum velocity in an enzyme catalyzed reaction.

[0109] The term “nucleotide analog” as used herein refers to modified or non-naturally occurring nucleotides such as 7-deaza purines (i.e., 7-deaza-dATP and 7-deaza-dGTP). Nucleotide analogs include base analogs and comprise modified forms of deoxyribonucleotides as well as ribonucleotides.

[0110] The term “polymorphic locus” is a locus present in a population which shows variation between members of the population (i.e., the most common allele has a frequency of less than 0.95). In contrast, a “monomorphic locus” is a genetic locus at little or no variations seen between members of the population (generally taken to be a locus at which the most common allele exceeds a frequency of 0.95 in the gene pool of the population).

[0111] The term “microorganism” as used herein means an organism too small to be observed with the unaided eye and includes, but is not limited to bacteria, virus, protozoans, fungi, and ciliates.

[0112] The term “microbial gene sequences” refers to gene sequences derived from a microorganism.

[0113] The term “bacteria” refers to any bacterial species including eubacterial and archaebacterial species.

[0114] The term “virus” refers to obligate, ultramicroscopic, intracellular parasites incapable of autonomous replication (i.e., replication requires the use of the host cell's machinery).

[0115] The term “sample” in the present specification and claims is used in its broadest sense. On the one hand it is meant to include a specimen or culture (e.g., microbiological cultures or cultured eukaryotic tissue cells). On the other hand, it is meant to include both biological and environmental samples.

[0116] Biological samples may be animal, including human, fluid, solid (e.g., stool) or tissue, as well as liquid and solid food and feed products and ingredients such as dairy items, vegetables, meat and meat by-products, and waste. Biological samples may be obtained from all of the various families of domestic animals, as well as feral or wild animals, including, but not limited to, such animals as ungulates, bear, fish, lagamorphs, rodents, etc.

[0117] Environmental samples include environmental material such as surface matter, soil, water and industrial samples, as well as samples obtained from food and dairy processing instruments, apparatus, equipment, utensils, disposable and non-disposable items. These examples are not to be construed as limiting the sample types applicable to the present invention.

[0118] The term “source of target nucleic acid” refers to any sample which contains nucleic acids (RNA or DNA). Particularly preferred sources of target nucleic acids are biological samples including, but not limited to cultured cells, blood, saliva, cerebral spinal fluid, pleural fluid, milk, lymph, sputum, and semen.

[0119] An oligonucleotide is said to be present in “excess” relative to another oligonucleotide (or target nucleic acid sequence) if that oligonucleotide is present at a higher molar concentration relative to that of the other oligonucleotide (or target nucleic acid sequence). Typically, when present in excess, the probe oligonucleotide will be present at least a 100-fold molar excess.

[0120] A sample “suspected of containing” a first and a second target nucleic acid may contain either, both or neither target nucleic acid molecule.

[0121] The terms “polymerization means” or “polymerization agent” refer to any agent capable of facilitating the addition of nucleoside triphosphates to an oligonucleotide.

[0122] The terms “ligation means” or “ligation agent” refer to any agent capable of facilitating the ligation (i.e., the formation of a phosphodiester bond between a 3′-OH and a 5′-P located at the termini of two strands of nucleic acid). Preferred ligation means comprise DNA ligases and RNA ligases.

[0123] The term “reactant” is used herein in its broadest sense. In some embodiments, the reactant can comprise an enzymatic reactant, a chemical reactant or ultraviolet light (ultraviolet light, particularly short wavelength ultraviolet light is known to break oligonucleotide chains). Any agent capable of reacting with an oligonucleotide to either shorten (i.e., cleave) or elongate the oligonucleotide is encompassed within the term “reactant.”

[0124] The terms “adduct” and “moiety” are used interchangeably, are used herein in their broadest sense to indicate any compound or element which can be added to an oligonucleotide. An adduct may be charged (positively or negatively) or may be charge neutral. An adduct may be added to the oligonucleotide via covalent or non-covalent linkages. Examples of adducts, include but are not limited to indodicarbocyanine dye amidites, amino-substituted nucleotides, ethidium bromide, ethidium homodimer, (1,3-propanediamino)propidium, (diethylenetriamino)propidium, thiazole orange, (N-N′-tetramethyl-1,3-propanediamino)propyl thiazole orange, (N-N′-tetramethyl-1,2-ethanediamino)propyl thiazole orange, thiazole orange-thiazole orange homodimer (TOTO), thiazole orange-thiazole blue heterodimer (TOTAB), thiazole orange-ethidium heterodimer 1 (TOED1), thiazole orange-ethidium heterodimer 2 (TOED2) and fluorescein-ethidium heterodimer (FED), psoralens, biotin, streptavidin, avidin, etc.

[0125] The term “recombinant DNA molecule” as used herein refers to a DNA molecule that comprises of segments of DNA joined together by means of molecular biological techniques.

[0126] The term “recombinant protein” or “recombinant polypeptide” as used herein refers to a protein molecule that is expressed from a recombinant DNA molecule.

[0127] As used herein the term “portion” when in reference to a protein (as in “a portion of a given protein”) refers to fragments of that protein. The fragments may range in size from four amino acid residues to the entire amino acid sequence minus one amino acid.

[0128] “Nucleic acid sequence” as used herein refers to an oligonucleotide, nucleotide or polynucleotide, and fragments or portions thereof, and to DNA or RNA of genomic or synthetic origin which may be single- or double-stranded, and represent the sense or antisense strand. Similarly, “amino acid sequence” as used herein refers to peptide or protein sequence.

[0129] “Peptide nucleic acid” (“PNA”) as used herein refers to a molecule which comprises an oligomer to which an amino acid residue, such as lysine, and an amino group have been added. These small molecules, also designated anti-gene agents, stop transcript elongation by binding to their complementary strand of nucleic acid (Nielsen et al., Anticancer Drug Des. 8:53 [1993]).

[0130] As used herein, the terms “purified” or “substantially purified” refer to molecules, either nucleic or amino acid sequences, that are removed from an environment, isolated or separated, and are at least 60% free, preferably 75% free, and most preferably 90% free from other components with which they were associated in the starting environment. The starting environment may be a natural one, as in the isolation of a non-recombinant protein, or it may be a created environment, as is the isolation of a recombinant protein from a host cell. For example, recombinant CLEAVASE nucleases may be expressed in bacterial host cells and the nucleases may be purified by the removal of host cell proteins; the percent of these recombinant nucleases is thereby increased in the sample. An “isolated polynucleotide” or “isolated oligonucleotide” is therefore a substantially purified polynucleotide.

[0131] As used herein, the term “fusion protein” refers to a chimeric protein containing the protein of interest joined to an exogenous protein fragment. The fusion partner may enhance solubility of recombinant chimeric protein as expressed in a host cell, may provide an affinity tag (e.g., a his-tag) to allow purification of the recombinant fusion protein from the host cell or culture supernatant, or both. If desired, the fusion protein may be removed from the protein of interest by a variety of enzymatic or chemical means known to the art.

[0132] As used herein, the terms “chimeric protein” and “chimerical protein” refer to a single protein molecule that comprises amino acid sequence portions derived from two or more parent proteins. These parent molecules may be similar proteins from genetically distinct origins, different proteins from a single organism, or dissimilar proteins from different organisms. By way of example but not by way of limitation, a chimeric structure-specific nuclease of the present invention may contain a mixture of amino acid sequences that have been derived from DNA polymerase genes from two or more of the organisms having such genes, combined to form a non-naturally occurring 5′ nuclease. The term “chimerical” as used herein is not intended to convey any particular proportion of contribution from the naturally occurring genes, nor limit the manner in which the portions are combined. Any chimeric structure-specific nuclease constructs having cleavage activity as determined by the testing methods described herein, for example, are improved cleavage agents within the scope of the present invention.

### DETAILED DESCRIPTION OF THE INVENTION

[0133] The INVADER invasive cleavage reaction has been shown to be useful in the detection of RNA target strands (See e.g., U.S. Pat. No. 6,001,567, incorporated herein by reference in its entirety). As with the INVADER assay for the detection of DNA (Lyamichev et al., Nat. Biotechnol., 17:292 [1999]), the reactions may be run under conditions that permit the cleavage of many copies of a probe for each copy of the target RNA present in the reaction. In one embodiment, the reaction may be performed at a temperature close to the melting temperature (Tₘ) of the probe that is cleaved, such that the cleaved and uncleaved probes readily cycle on and off the target strand without temperature cycling. Each time a full-length probe binds to the target in the presence of the INVADER oligonucleotide, it may be cleaved by a 5′ nuclease enzyme, resulting in an accumulation of cleavage product. The accumulation is highly specific for the sequence being detected, and may be configured to be proportional to both time and target concentration of the reaction. In another embodiment, the temperature of the reaction may be shifted (i.e., it may be raised to a temperature that will cause the probe to dissociate) then lowered to a temperature at which a new copy of the probe hybridizes to the target and is cleaved by the enzyme. In a further embodiment, the process of raising and lowering the temperature is repeated many times, or cycled, as it is in PCR (Mullis and Faloona, Methods in Enzymology, 155:335 [1987], Saiki et al., Science 230:1350 [1985]).

[0134] As noted above, 5′ nucleases of Pol A type DNA polymerases are preferred for cleavage of an invasive cleavage structure that comprises an RNA target strand. The present invention provides enzymes having improved performance in detection assays based on the cleavage of a structure comprising RNA. In particular, the altered polymerases of the present invention exhibit improved performance in detection assays based on the cleavage of a DNA member of an invasive cleavage structure that comprises an RNA target strand.

[0135] The 5′ nucleases of the present invention may be derived from Pol A type DNA polymerases. The terminology used in describing the alterations made in this class of 5′ nucleases relates to the descriptions of DNA polymerase structures known in the art. The Klenow fragment of the Pol A polymerase from E. coli (the C-terminal two thirds, which has the DNA synthesizing activity but lacks the 5′ nuclease activity) has been described as having a physical form resembling a right hand, having an open region called the “palm”, and a cleft that holds the primer/template duplex defined on one side by a “fingers” domain and on the other by a “thumb” domain (Joyce and Steitz, Trends in Biochemical Science 12:288 [1987]). This is shown schematically in FIG. 5. Because this physical form has proved to be common to all Pol A DNA polymerases and to a number of additional template-dependent polymerizing enzymes such as reverse transcriptases, the hand terminology has become known in the art, and the sites of activity in these enzymes are often described by reference to their position on the hand. For reference, and not intended as a limitation on the present invention, the palm is created from roughly the first 200 amino acids of the polymerase domain, the thumb from the middle 140, and the fingers by the next 160, with the base of the cleft formed from the remaining regions (FIG. 6). Although some enzymes may deviate from these structural descriptions, the equivalent domains and sequences corresponding to such domains may be identified by sequence homology to known enzyme sequences, by comparison of enzyme crystal structures, and other like methods.

[0136] In creating the improved enzymes of the present invention, several approaches have been taken, although the present invention in not limited to any particular approach. First two DNA polymerases, Taq and Tth, that have different rates of DNA strand cleavage activity on RNA targets were compared. To identify domains related to the differences in activity, a series of chimerical constructs was created and the activities were measured. This process identified two regions of the Tth polymerase that could, if transferred into the Taq polymerase, confer on the TaqPol an RNA-dependent cleavage activity equivalent to that of the native Tth protein. Once these regions were identified, the particular amino acids involved in the activity were examined. Since the two proteins are about 87 percent identical in amino acid sequence overall, the identified regions had only a small number of amino acid differences. By altering these amino acids singly and in combinations, a pair of amino acids were identified in TthPol that, if introduced into the TaqPol protein, increased the rate of cleavage up to that of the native TthPol.

[0137] These data demonstrate two important aspects of the present invention. First, specific amino acids can be changed to confer TthPol-like RNA-dependent cleavage activity on a polymerase having a lesser activity. More broadly, however, these results provide regions of these polymerases that are involved in the recognition of the RNA-containing cleavage structure. Identification of these important regions, combined with published information on the relationships of other amino acids to the various functions of these DNA polymerases and computer-assisted molecular modeling during the development of the present invention have allowed a rational design approach to create additional improved 5′ nucleases. The information also allowed a focused random mutagenesis approach coupled with a rapid screening procedure to quickly create and identify enzymes having improved properties. Using these methods of the present invention, a wide array of improved polymerases are provided.

[0138] The methods used in creating and selecting the improved 5′ nucleases of the present invention are described in detail below and in the experimental examples. A general procedure for screening and characterizing the cleavage activity of any 5′ nuclease is included in the experimental examples. The methods discussions are divided into the following sections: I) Creation and selection of chimerical constructs; II) Site-specific mutagenesis based on information from chimerical constructs; III) Site-specific mutagenesis based on molecular modeling and published physical studies; and IV) focused random mutagenesis.

[0139] I) Creation and selection of chimerical constructs

[0140] The PolA-type DNA polymerases, including but not limited to DNA polymerase enzymes from Thermus species, comprise two distinctive domains, the 5′ nuclease and the polymerase domains, shown schematically in FIG. 6. The polymerase domains reside in the C-terminal two-thirds of the proteins and are responsible for both DNA-dependent and RNA-dependent DNA polymerase activities. The N-terminal one-third portions contain the 5′ nuclease domains. In the genus Thermus Pol A polymerase, the palm region consists of, roughly, amino acids 300-500, the thumb region includes amino acids 500-650, while the fingers region is formed by the remaining amino acids from 650 to 830 (FIG. 6).

[0141] The derivatives, Taq DN RX HT and Tth DN RX HT, of Taq and TthPol used in many of the experiments of the present invention, and described herein, are modified to reduce synthetic activity and to facilitate chimera construction, but have 5′ nuclease activity essentially identical to unmodified TaqPol and TthPol. Unless otherwise specified, the TaqPol and TthPol enzymes of the following discussion refer to the DN RX HT derivative.

[0142] TthPol has a 4-fold higher cleavage rate with the IL-6 RNA template (shown in FIG. 10) than TaqPol (shown in FIGS. 11 and 12), although the Taq and TthPols show similarities of cleavage in DNA target structures (FIG. 10). Since the amino acid sequences of TaqPol and TthPol (FIGS. 8 and 9) share about 87% identity and greater than 92% similarity, the high degree of homology between the enzymes allowed creation of a series of chimeric enzymes between TthPol and TaqPol. The activity of the chimeric enzymes was used as a parameter to identify the region(s) of these proteins affecting RNA dependent 5′ nuclease activity.

[0143] The chimeric constructs between TthPol and TaqPol genes shown schematically in FIGS. 7 and 19 were created by swapping DNA fragments defined by the restriction endonuclease sites, EcoRI and BamHI, common for both genes, the cloning vector site SalI and the new sites, NotI, BstBI and NdeI, created at the homologous positions of both genes by site directed mutagenesis. The restriction enzymes have been abbreviated as follows: EcoRI is E; NotI is N; BstBI is Bs; NdeI is D, BamHI is B, and SalI is S.

[0144] The activity of each chimeric enzyme was evaluated using the invasive signal amplification assay with the IL-6 RNA target (FIG. 10), and the cycling cleavage rates shown in FIG. 12 were determined as described in the Experimental Examples. Comparison of the cleavage rates of the first two chimeras, TaqTth(N) and TthTaq(N), created by swapping the polymerase and 5′ nuclease domains at the NotI site (FIG. 7), shows that TaqTth(N) has the same activity as TthPol, whereas its counterpart TthTaq(N) retains the activity of TaqPol (FIG. 12). This result indicates that the higher cleavage rate of TthPol is associated with its polymerase domain and suggests an important role of the polymerase domain in the 5′ nuclease activity.

[0145] The next step was to identify a minimal region of TthPol polymerase that would give rise to the TthPol-like RNA dependent 5′ nuclease activity when substituted for the corresponding region of the TaqPol sequence. To this end, the TaqTth(N) chimera was selected to generate a series of new constructs by replacing its TthPol sequence with homologous regions of TaqPol. First, the N-terminal and C-terminal parts of the TaqPol polymerase domain were substituted for the corresponding regions of TaqTth(N) using the common BamHI site as a breaking point to create TaqTth(N-B) and TaqTth(B-S) chimeras, respectively (FIG. 7). TaqTth(N-B) which has the TthPol sequence between amino acids 328 and 593, is approximately 3 times more active than the TaqTth(B-S) and 40% more active than TthPol (FIG. 12). This result establishes that the NotI-BamHI portion of the TthPol polymerase domain determines superior RNA-dependent 5′ nuclease activity of TthPol.

[0146] From these data it was determined that a central portion of the TthPol, when used to replace the homologous portion of TaqPol (TaqTth(N-B) construct) could confer superior RNA recognition on the chimerical protein composed primarily of Taq protein. In fact, the cycling rate of this chimerical protein exceeded that of the parent TthPol. Comparison of chimeras that included sub-portions of the activity-improving region of TthPol, approximately 50% of the region in each case (See, TaqTth(N-D) and TaqTth(D-B), FIGS. 7 and 12) showed no significant improvement in RNA dependent activity as compared to the parent TaqPol. This result indicates that aspects of each half of the region are required for this activity. A construct having an only slightly smaller portion of the Tth insert portion (TaqTth(Bs-B)) showed activity that was close to that of the parent TthPol protein, but which was less than that of the TaqTth(N-B) construct.

[0147] II) Site-specific mutagenesis based on information from chimerical constructs

[0148] Comparison of the TthPol and TaqPol amino acid sequences between the BstBI and BamHI sites reveals only 25 differences (FIG. 13). Among those, there are 12 conservative changes and 13 substitutions resulting in a change in charge. Since the analysis of the chimeric enzymes has suggested that some critical amino acid changes are located in both BstBI-NdeI and NdeI-BamHI regions of TthPol, site directed mutagenesis was used to introduce the TthPol specific amino acids into the BstBI-NdeI and NdeI-BamHI regions of the TaqTth(D-B) and TaqTth (N-D) chimeras, respectively. Six TthPol-specific substitutions were generated in the BstBI-NdeI region of the TaqTth(D-B) by single or double amino acid mutagenesis and only one double mutation, W417L/G418K, was able to restore the TthPol activity with the IL-6 RNA target (See e.g., FIG. 14). Similarly, 12 TthPol specific amino acids were introduced at the homologous positions of the NdeI-BamHI region of the TaqTth(N-D) and only one of them, E507Q, increased the cleavage rate to the TthPol level (See e.g., FIG. 14).

[0149] To confirm that the W417L, G418K and E507Q substitutions are sufficient to increase the TaqPol activity to the TthPol level, TaqPol variants carrying these mutations were created and their cleavage rates with the IL-6 RNA substrate were compared with that of TthPol. FIG. 15 shows that the TaqPol W417L/G418K/E507Q and TaqPol G418K/E507Q mutants have 1.4 times higher activity than TthPol and more than 4 fold higher activity than TaqPol, whereas the TaqPol W417L/E507Q mutant has the same activity as TthPol, which is about 3 fold higher than TaqPol. These results demonstrate that K418 and Q507 of TthPol are important amino acids in defining its superior RNA dependent 5′ nuclease activity compared to TaqPol.

[0150] The ability of these amino acids to improve the RNA dependent 5′ nuclease activity of a DNA polymerase was tested by introducing the corresponding mutations into the polymerase A genes of two additional organisms: Thermus filiformus and Thermus scotoductus. TaqPol showed improved RNA dependent activity when it was modified to contain the W417L and E507Q mutations, which made it more similar at these residues to the corresponding residues of TthPol (K418 and Q507). The TfiPol was modified to have P420K and E507Q, creating TfiDN 2M, while the TscPol was modified to have E416K and E505Q, to create TscDN 2M. The activity of these enzymes for cleaving various DNA and RNA containing structures was determined as described in Example 1, using the IdT2, IrT3, hairpin and X-structures diagrammed in FIGS. 21 and 22, with the results shown in both FIG. 25 and Table 7. Both enzymes have much less RNA-dependent cleavage activity than either the TthPol or the Taq 2M enzymes. However, introduction of the mutations cited above into these polymerases increased the RNA dependent cleavage activity over 2 fold compared to the unmodified enzymes (FIG. 25). These results demonstrate that transferability of improved RNA dependent cleavage activity into a wide range of polymerases using the methods of the present invention.

[0151] III) Site-specific mutagenesis based on molecular modeling and published physical studies

[0152] The positions of the G418H and E507Q mutations in the crystal structure of a complex of the large fragment of TaqPol (Klentaql) with a primer/template DNA determined by Li et al. (Li et al., Protein Sci., 7:1116 [1998]) are shown in FIG. 17. The E507Q mutation is located at the tip of the thumb subdomain at a nearest distance of 3.8 Å and 18 Å from the backbone phosphates of the primer and template strands, respectively. The interaction between the thumb and the minor groove of the DNA primer/template was previously suggested by the co-crystal structures of Klenow fragment DNA polymerase I (Breese et al., Science 260:352 [1993]) and TaqPol (Eom et al., Nature 382:278 [1996]). Deletion of a 24 amino acid portion of the tip of the thumb in Klenow fragment, corresponding to amino acids 494-518 of TaqPol, reduces the DNA binding affinity by more than 100-fold (Minnick et al., J. Biol. Chem., 271:24954 [1996]). These observations are consistent with the hypothesis that the thumb region, which includes the E507 residue, is involved in interactions with the upstream substrate duplex.

[0153] The W417L and the G418K mutations in the palm region of TaqPol (FIG. 17) are located approximately 25 Å from the nearest phosphates of the template and upstream strands, according to the co-crystal structures of TaqPol with duplex DNA bound in the polymerizing mode (Li et al, Protein Sci., 7:1116 [1998], Eom et al., Nature 382:278 [1996]). The same distance was observed between the analogous W513 and P514 amino acids of Klenow fragment and the template strand of DNA bound in the editing mode (Breese et al, Science 260:352 [1993]). Thus, no interactions between TaqPol and the overlapping substrate can be suggested from the available co-crystal studies for this region.

[0154] Although an understanding of the mechanism of action of the enzymes is not necessary for the practice of the present invention and the present invention is not limited to any mechanism of action, it is proposed that the amino acids at positions 417 and 418 in the palm region of TaqPol interact with the upstream substrate duplex only when the enzyme functions as a 5′ nuclease, but no interaction with these amino acids occurs when TaqPol switches into polymerizing mode. This hypothesis suggests a novel mode of substrate binding by DNA polymerases called here the “5′ nuclease mode.” Several lines of evidence support this hypothesis. The study of the chimeric enzymes described here clearly separates regions of the polymerase domain involved in the 5′ nuclease and polymerase activities. Accordingly, the W417L and G418K mutations, together with the E507Q mutation, affect the 5′ nuclease activity of TaqPol on substrates having an RNA target strand (FIG. 15), but have no effect on either RNA-dependent or DNA-dependent DNA polymerase activities (FIG. 16). On the other hand, mutations in the active site of TaqPol, such as R573A, R587A, E615A, R746A, N750A and D785N, which correspond to substitutions in Klenow fragment of E. coli DNA Pol I that affect both polymerase activity and substrate binding affinity in the polymerizing mode (Polesky et al, J. Biol. Chem., 265:14579 [1990], Polesky et al., J. Biol. Chem., 267:8417 [1992], Pandey et al., Eur. J. Biochem., 214:59 [1993]) were shown to have little or no effect on the 5′ nuclease activity. Superposition of the polymerase domains of TaqPol (Eom et al., Nature 382:278 [1996]), E. coli Pol I and Bacillus stearothermophilus Pol I (Kiefer et al., Nature 391:304 [1998]) using the programs DALI (Holm and Sander, J. Mol. Biol., 233:123 [1993], Holm and Sander, Science 273:595 [1996]) and Insight II (Molecular Simulation Inc., Naperville, Ill.) shows that the palm region of TaqPol between amino acids 402-451, including W417 and G418, is structurally highly conserved between the three polymerases, although there is no structural similarity between the rest of the palm subdomains. This observation suggests an important role for this region in eubacterial DNA polymerases.

[0155] The 5′ nuclease and polymerase activities should be precisely synchronized to create a nicked structure rather than a gap or an overhang that could cause a deletion or an insertion during Okazaki fragment processing or DNA repair, if ligase joins the ends inappropriately. According to the previously proposed model (Kaiser et al, J. Biol. Chem., 274:21387 [1999]), the 3′ terminal nucleotide of the upstream strand is sequestered by the 5′ nuclease domain to prevent its extension, thus halting synthesis. The interaction with the 3′ nucleotide apparently activates the 5′ nuclease that endonucleolitically removes the displaced 5′ arm of the downstream strand. This cleavage occurs by the precise incision at the site defined by the 3′ nucleotide, thus creating the nick. This model requires a substantial rearrangement of the substrate-enzyme complex, which may include a translocation of the complex to the 5′ nuclease mode to separate the primer/template from the polymerase active site.

[0156] It is possible that a relocation of the substrate away from the polymerase active site could be induced by the interaction between the duplex formed between the template and incoming strands and the crevice formed by the finger and thumb subdomains. Such an interaction could force conformational transitions in the thumb that would bring the template/primer duplex into close contact with the W417 and G418 amino acids. Significant flexibility of the thumb has been previously reported that might explain such changes (Beese et al., Science 260:352 [1993], Eom et al., Nature 382:278 [1996], Ollis et al., Nature 313:762 [1985], Kim et al., Nature 376:612 [1995], Korolev et al., Proc. Natl. Acad. Sci., 92:9264 [1995], Li et al., EMBO J., 17:7514 [1998]). Additional conformational changes of the fingers domain that might help to open the crevice, such as the transition from the ‘closed’ to the ‘open’ structure described by Li et al. (Li et al., EMBO J., 17:7514 [1998]), are consistent with this model. It may be that the 5′ nuclease binding mode was not observed in any of the published co-crystal structures of a DNA Pol I because the majority of the structures were solved for the polymerase domain only, with a template/primer substrate rather than with an overlapping 5′ nuclease substrate.

[0157] Kₘ values of 200-300 nM have been determined for TaqPol, TthPol and TaqPol G418K/E507Q for the RNA containing substrate. These values are much higher than the Kₘ value of <1 nM estimated for TthPol with an all-DNA overlapping substrate suggesting that the RNA template adversely affects substrate binding. The low affinity could be explained by the unfavorable interaction between the enzyme and either the A-form duplex adopted by the substrate with an RNA target, or the ribose 2′ hydroxyls of the RNA strand. Between these two factors, the latter seems more likely, since the 5′ nucleases of eubacterial DNA polymerases can efficiently cleave substrates with an RNA downstream probe (Lyamichev et al., Science 260:778 [1993]), which would presumably have an A-form. Further, the co-crystal studies suggest that the template/primer duplex partially adopts a conformation close to A-form in its complex with DNA polymerase (Eom et al., Nature 382:278 [1996], Kiefer et al., Nature 391:304 [1998], Li et al., EMBO J., 17:7514 [1998]). The G418K/E507Q mutations increase the k_{cat} of TaqPol more than two fold, but have little effect on Kₘ. Such an effect would be expected if the mutations position the substrate in an orientation more appropriate for cleavage rather than simply increasing the binding constant.

[0158] In addition to the mutational analysis described above, another approach to studying specific regions of enzymes, enzyme structure-function relationships, and enzyme-substrate interaction is to investigate the actual, physical structure of the molecule.

[0159] With the advances in crystallographic, NMR, and computer and software technology, study of molecular structure has become a viable tool for those interested in the configuration, organization, and dynamics of biomolecules. Molecular modeling has increased the understanding of the nature of the interactions that underlie the structure of proteins and how proteins interact functionally with substrate. Numerous publications describing the structures of various polymerases or polymerase protein portions, HIV reverse transcriptase, and other nucleic acid binding proteins have provided mechanistic insights into protein conformation, changes in conformation, and molecular interactions necessary for function.

[0160] As an example, the report by Doublie et al. (Doublie et al, Nature 391:251 [1998]) discloses the crystal structure of T7 DNA polymerase and provides information about which amino acid regions are likely to have an affect on substrate binding, which are required to contact the substrate for polymerization, and which amino acids bind cofactors, such as metal ions. It is noted in this paper and others that many of the polymerases share not only sequence similarity, but structural homology as well. When certain structural domains of different polymerases are superimposed (for example, T7 polymerase, Klenow fragment editing complex, the unliganded Taq DNA polymerase and the Taq Polymerase-DNA complex) conserved motifs are clearly discernable.

[0161] Specifically, combining the information from all of these different structural sources and references, a model of the protein interacting with DNA, RNA, or heteroduplex can be made. The model can then be examined to identify amino acids that may be involved in substrate recognition or substrate contact. Changes in amino acids can be made based on these observations, and the effects on the various activities of the 5′ nuclease proteins are assessed using screening methods such as those of the present invention, described in the experimental examples.

[0162] The domain swapping analysis discussed previously demonstrated that sequences of TthDN that are important in RNA-dependent 5′ nuclease activity lie in the polymerase domain of the protein. Therefore, study of structural data of the polymerase domain with respect to nucleic acid recognition provides one method of locating amino acids that, when altered, alter RNA recognition in a 5′ nuclease reaction. For example, analysis conducted during the development of the present invention examined published analyses relating to primer/template binding by the polymerase domain of E. coli Pol 1, the Klenow fragment. Table 1 shows a sampling of kinetic constants determined for the Klenow fragment, and shows the effects a number of mutations on these measurements. The corresponding or similarly positioned amino acids in the TaqPol are indicated in the right hand column. It was postulated that mutations having a noticible impact on the interactions of the Klenow fragment with the DNA template or the primer/template duplex, as indicated by changes in K_{d} and Relative DNA affinity values, might also have effects when made at the corresponding sites in TaqPol and related chimerical or mutant derivatives. A selection of the mutations that produced a higher K_{d} value or a lower Relative DNA affinity value when introduced into the Klenow fragment were created and examined in TaqPol. These Taq derivatives include, but are not limited to, those indicated by asterisks in the right hand column of Table 1.

[0163] For some Klenow variants, such as the R682 mutants, selection for testing was not made based on the DNA affinity measurements, but because molecular modeling suggested interaction between some aspect of the template/primer duplex and that amino acid. Similarly, additional regions of Taq polymerase (or Taq derivatives) were targeted for mutagenesis based on structural data and information from molecular modeling. Based on modeling, the thumb region was postulated to contact an RNA template. Thus, amino acids in the thumb region were looked for that, if altered, might alter that contact. For example, FIGS. 6 and 17 show that amino acids 502, 504, and 507 are located at the tip of the thumb. It was postulated that altering these amino acids might have an affect on the enzyme-substrate interaction. Using the activity screening methods described In Example 1, mutations that produced beneficial effects were identified. This approach was used to create a number of improved enzymes. For example, TaqPol position H784, corresponding to Klenow amino acid H881, is an amino acid in the fingers region and, as such, may be involved in primer/template substrate binding. When the H881 amino acid in the Klenow enzyme is replaced by alanine, the change decreases the affinity of the enzyme for DNA to only 30 to 40% of the wild type level. An analogous substitution was tested in a TaqPol-derived enzyme. Starting with the Taq derivative W417L/G418K/E507Q, amino acid 784 was changed from Histidine (H) to Alanine (A) to yield the W417L/G418K/E507Q/H784A mutant, termed Taq 4M. This variant showed improved 5′ nuclease activity on the RNA test IrT1 (FIG. 24) test substrate (data in Table 2). Amino acid R587 is in the thumb region, and was selected for mutation based on its close proximity to the primer/template duplex in computer models. When an R587A mutation was added to the Taq 4M variant, the activity on the test IrT1 test substrate was still further improved. In addition, the reduction, relative to the 4M variant, in cleavage of the X structure shown in FIG. 22 constitutes an additional improvement in this enzyme's function.

[0164] Not all amino acid changes that reduce DNA binding in the polymerization affect the 5′ nuclease activity. For example, mutations E615A, R677A, affecting amino acid that are also in the thumb and fingers domains, respectively, have either adverse effect, or no effect on the 5′ nuclease activities, respectively, as measured using the test substrates in FIGS. 21 and 22, and compared to the parent variants that lacked these changes. The R677A mutation was added to, and compared with the TaqSS variant, while the E615A mutation was added to and compared with the Taq 4M variant. The test methods described herein provide a convenient means of analyzing any variant for the alterations in the cleavage activity of both invasive an noninvasive substrates, for both DNA and RNA containing structures. Thus, the present invention provides methods for identifying all suitable improved enzymes.

[0165] Alterations that might increase the affinity of the enzymes for the nucleic acid targets were also examined. Many of the mutations described above were selected because they caused the Klenow fragment enzyme to have decreased affinity for DNA, with the goal of creating enzymes more accepting of structures containing non-DNA strands. In general, the native DNA polymerases show a lower affinity for RNA/DNA duplexes, compared to their affinity for DNA/DNA duplexes. During the development of the present invention, it was sought to increase the general affinity of the proteins of the present invention for a nucleic acid substrate without restoring or increasing any preference for structures having DNA rather than RNA target strands. The substitution of amino acids having different charges was examined as a means of altering the interaction between the proteins and the nucleic acid substrates. For example, it was postulated that addition of positively charged amino acid residues, such as lysine (K), might increase the affinity of a protein for a negatively charged nucleic acid.

[0166] As noted above, alterations in the thumb region could affect the interactions of the protein with the nucleic acid substrate. In one example, the mutation G504K (tip of the thumb) was introduced in Taq4M and caused and enhancement of nuclease activity by 15% on an RNA target. Additional positively charged mutations (A502K and E507K) further improve the RNA target dependent activity by 50% compared to the parent Taq4M enzyme.

[0167] The use of data from published studies and molecular modeling, in combination with results accrued during the development of the present invention allowed the identification of regions of the proteins in which changes of amino acids would be likely to cause observable differences in at least one aspect of cleavage function. While regions could be targeted in this way, it was observed that changes in different amino acids, even if near or immediate neighbors in the protein, could have different effects. For example, while the A502K substitution created a marked increase in the RNA-dependent cleavage activity of Taq 4M, changing amino acid 499 from G to a K, only 3 amino acids away from 502, gave minimal improvement. As can be seen in the Experimental Examples, the approach of the present invention was to change several amino acids in a candidate region, either alone or in combination, then use the screening method provided in Example 1 to rapidly assess the effects of the changes. In this way, the rational design approach is easily applied to the task of protein engineering.

[0168] In addition to the thumb, palm, and hand regions found in the polymerase domain of these proteins, regions that are specific to 5′ nucleases and nuclease domains were examined. Comparative studies on a variety of 5′ nucleases have shown that, though the amino acid sequences vary dramatically from enzyme to enzyme, there are structural features common to most. Two of these features are the helix-hairpin-helix motif (H-h-H) and the arch or loop structure. The H-h-H motif is believed to mediate non-sequence specific DNA binding. It has been found in at least 14 families of proteins, including nucleases, N-glycosylases, ligases, helicases, topoisomerases, and polymerases (Doherty et al., Nucl. Acid. Res., 24:2488 [1996]). The crystallographic structure of rat DNA polymerase pol β bound to a DNA template-primer shows non-specific hydrogen bonds between the backbone nitrogens of the pol β HhH motif and the phosphate oxygens of the primer of the DNA duplex (Pelletier et al., Science 264:1891 [1994]). Because the HhH domain of 5′ nuclease domains of Taq and Tth polymerases may function in a similar manner, it is contemplated that mutations in the HhH region of the enzyme alter activity. Mutations may be introduced to alter the shape and structure of the motif, or to change the charge of the motif to cause increased or decreased affinity for substrate.

[0169] Another structure common to many 5′ nucleases from diverse sources such as eukaryotes, eubacteria, archaea and phage, is the arch or loop domain. The crystal structure of the 5′ exonuclease of bacteriophage T5 showed a distinct arch formed by two helices, one positively charged and one containing hydrophobic residues (Ceska et al., Nature 382:90 [1996]). Interestingly, three residues that are conserved between T5 and Taq, Lys 83, Arg 86 and Tyr 82 are all in the arch. These correspond to amino acids Lys 83, Arg 86, and Tyr 82 in Taq DNA polymerase. The crystal structure for Taq (5′ nuclease) has also been determined (Kim et al., Nature 376:612 [1995]).

[0170] The crystal structure from the flap endonuclease-1 from Methanococcus janneschii also shows such a loop motif (Hwang et al., Nat. Struct. Biol., 5:707 [1998]). The backbone crystal structure of Mja FEN-1 molecules may be superimposed on T5 exonuclease, Taq 5′-exonuclease and T4 RNase H. An interesting feature common to all of these is the long loop. The loop of FEN-1 consists of a number of positively charged and aromatic residues and forms a hole with dimensions large enough to accommodate a single-stranded DNA molecule. The corresponding region in T5 exonuclease consists of three helices forming a helical arch. The size of the hole formed by the helical arch in T5 exonuclease is less than half that formed by the L1 loop in Mj FEN-1. In T4 RNase H or Taq 5′ exonuclease, this region is disordered. Some regions of the arch bind metals, while other regions of the arch contact nucleic acid substrate. Alignment of the amino-acid sequences of six 5′ nuclease domains from DNA polymerases in the pol I family show six highly conserved sequence motifs containing ten conserved acidic residues (Kim et al., Nature 376 [1995]).

[0171] The effects of alterations in the arch region were examined. In Taq polymerase the arch region is formed by amino acids 80-95 and 96-109. Site directed mutagenesis was performed on the arch region. Alignment of amino acid sequences of the FEN and polymerase 5′ nucleases suggested the design of 3 amino acid substitution mutations, P88E, P90E and G80E. These substitutions were made on the Taq4M polymerase mutant as a parent enzyme. Results indicated that although the background activity on the HP and X substrates shown in FIG. 22 are tremendously suppressed in all mutants, the desirable 5′ nuclease activity on proper substrates (IdT and IrT, FIG. 24) is also reduced. Despite the sequence homology between Taq and Tth polymerases, they have very different activity on HP and X substrates. The alignment of the Taq and Tth polymerase arch regions also demonstrates regions of extensive sequence homology as well as minor differences. These differences led to the design of mutations L109F and A110T using Taq4M to generate Taq4M L109F/A110T, and the mutant Taq 4M A502K/G504K/E507K/T514S to generate Taq 4M L109F/A110T/A502K/G504K/E507K/T514S mutant. These two mutations have drastically converted Taq4M enzyme to become more like Tth enzyme in terms of the background substrate specificity while the 5′ nuclease activities on both DNA and RNA substrates are almost unchanged.

[0172] IV) Focused random mutagenesis

[0173] As described above, physical studies and molecular modeling may be used alone or in combination to identify regions of the enzymes in which changes of amino acids are likely to cause observable differences in at least one aspect of cleavage function. In the section above, use of this information was described to select and change specific amino acids or combinations of amino acids. Another method of generating an enzyme with altered function is to introduce mutations randomly. Such mutations can be introduced by a number of methods known in the art, including but not limited to, PCR amplification under conditions that favor nucleotide misincorporation (REF), amplification using primers having regions of degeneracy (i.e., base positions in which different individual, but otherwise similar oligonucleotides in a reaction may have different bases), and chemical synthesis. Many methods of random mutagenesis are known in the art (Del Rio et al., Biotechniques 17:1132 [1994]), and may be incorporated into the production of the enzymes of the present invention. The discussions of any particular means of mutagenesis contained herein are presented solely by way of example and not intended as a limitation. When random mutagenesis is performed such that only a particular region of an entire protein is varied, it can be described as “focused random mutagenesis.” As described in the Experimental Examples, a focused random mutagenesis approach was applied to vary the HhH and the thumb domains some of the enzyme variants previously created. These domains were chosen to provide examples of this approach, and it is not intended that the random mutagenesis approach be limited to any particular domain, or to a single domain. It may be applied to any domain, or to any entire protein. Proteins thus modified were tested for cleavage activity in the screening reactions described in Example 1, using the test substrates diagrammed in FIGS. 22 and 24, with the results described in Tables 5 and 6.

[0174] Random mutagenesis was performed on the HhH region with the parent TaqSS or TthDN H785A mutants. None of the 8 mutants generated showed an improvement in activity compared to the parent enzyme (Table 5). In fact, mutations of the region between residues 198-205 have about 2-5 fold lower activity on both DNA and RNA substrates, suggesting that this region is essential for substrate recognition. Mutagenesis in the thumb region resulted in new mutations that improved 5′ nuclease activity by 20-100% on a DNA target and about 10% on an RNA target (Table 6).

[0175] Numerous amino acids in each of the distinct subdomains play roles in substrate contact. Mutagenesis of these may alter substrate specificity by altering substrate binding. Moreover, mutations introduced in amino acids that do not directly contact the substrate may also alter substrate specificity through longer range or general conformation altering effects. These mutations may be introduced by any of several methods known in the art, including, but not limited to random mutagenesis, site directed mutagenesis, and generation of chimeric proteins.

[0176] As noted above, numerous methods of random mutagenesis are known in the art. The methods applied in the focused random mutagenesis described herein my be applied to whole genes. It is also contemplated that additional useful chimerical constructs may be created through the use of molecular breeding (See e.g., U.S. Pat. No. 5,837,458 and PCT Publications WO 00/18906, WO 99/65927, WO 98/31837, and WO 98/27230, herein incorporated by reference in their entireties). Regardless of the mutagenesis method chosen, the rapid screening method described herein provides a fast and effective means of identifying beneficial changes within a large collection of recombinant molecules. This makes the random mutagenesis procedure a manageable and practical tool for creating a large collection of altered 5′ nucleases having beneficial improvements. The cloning and mutagenesis strategies employed for the enzymes used as examples are applicable to other thermostable and non-thermostable Type A polymerases, since DNA sequence similarity among these enzymes is very high. Those skilled in the art would understand that differences in sequence would necessitate differences in cloning strategies, for example, the use of different restriction endonucleases may be required to generate chimeras. Selection of existing alternative sites, or introduction via mutagenesis of alternative sites are well established processes and are known to one skilled in the art.

[0177] Enzyme expression and purification can be accomplished by a variety of molecular biology methods. The examples described below teach one such method, though it is to be understood that the present invention is not to be limited by the method of cloning, protein expression, or purification. The present invention contemplates that the nucleic acid construct be capable of expression in a suitable host. Numerous methods are available for attaching various promoters and 3′ sequences to a gene structure to achieve efficient expression.

[0178] V) Site-Specific mutagenesis

[0179] In some embodiments of the present invention, any suitable technique (e.g., including, but not limited to, one or more of the techniques described above) are used to generate improved cleavage enzymes (e.g., SEQ ID NO:280) with heterologous domains. Accordingly, in some embodiments, site-specific mutagenesis (e.g., primer-directed mutagenesis using a commercially available kit such as the Transformer Site Directed mutagenesis Kit (Clontech)) is used to make a plurality of changes throughout a nucleic acid sequence in order to generate a nucleic acid encoding a cleavage enzyme of the present invention. In some embodiments, a plurality of primer-directed mutagenesis steps are carried out in tandem to produce a nucleic acid encoding a cleavage enzyme of the present invention.

[0180] In some embodiments, a plurality of primer directed mutagenesis steps are directed to a selected portion of a nucleic acid sequence in order to produce changes in a selected portion of a cleavage enzyme of the present invention. In other embodiments, a nucleic acid having changes in one selected portion is recombined with a nucleic acid having mutations in a different selected portion (e.g., through cloning, molecular breeding, or any of the other recombination methods known in the art) thereby creating a nucleic acid having mutations in a plurality of selected portions, and encoding a cleavage enzyme of the present invention. The mutations in each selected portion may be introduced by any of the methods described above, or any combination of said methods, including but not limited to, methods of random mutagenesis and site-directed mutagenesis.

[0181] For example, in one illustrative embodiment of the present invention, the nucleic acid sequence of SEQ ID NO:279 (a nucleic acid sequence encoding the cleavage enzyme of SEQ ID NO:280) is generated by making a plurality of primer-directed mutations to the nucleic acid sequence of SEQ ID NO:165 (see Example 7 for the construction of SEQ ID NO:165). In some embodiments, each mutation is introduced using a separate mutagenesis reaction. Reactions are carried out sequentially such that the resulting nucleic acid (SEQ ID NO:279) contains all of the mutations. In another illustrative embodiment of the present invention, the nucleic acid sequence of SEQ ID NO:279 is generated by making a plurality of primer-directed mutations (e.g., as described above) in the nuclease portion (e.g., as diagramed in FIG. 6) of SEQ ID NO:186. The mutated nuclease portion is then combined with the “polymerase” portion of SEQ ID NO:165 at the NotI site, using the recombination methods described in Example 4, thereby creating a single nucleic acid having the sequence shown in SEQ ID NO:279, and encoding the cleavage enzyme of SEQ ID NO:280. Following mutagenesis, the resulting altered polypeptide is produced and tested for cleavage activity using any suitable assay (e.g., including, but not limited to, those described in Examples 1 and 6). In some embodiments, the nucleic acid sequence encoding the cleavage enzyme of SEQ ID NO:280 (e.g., SEQ ID NO:279) is further modified using any suitable method.

### EXPERIMENTAL

[0182] The following examples serve to illustrate certain preferred embodiments and aspects of the present invention and are not to be construed as limiting the scope thereof.

[0183] In the disclosure which follows, the following abbreviations apply: Afu (Archaeoglobus fulgidus); Mth (Methanobacterium thermoautotrophicum); Mja (Methanococcus jannaschii); Pfu (Pyrococcus furiosus); Pwo (Pyrococcus woesei); Taq (Thermus aquaticus); TaqPol (T. aquaticus DNA polymerase I); StfPol (the Stoffel fragment of TaqPol); EcIPol (E. coli DNA polymerase I); Tth (Thermus thermophilus); TthPol (T. thermophilus DNA polymerase I); Tsc (Thermus scotoductus); TscPol (Thermus scotoductus DNA polymerase I); Tfi (Thermus filiformis); TfiPol (Thermus filiformis DNA polymerase I); Ex. (Example); Fig. (Figure); ° C. (degrees Centigrade); g (gravitational field); vol (volume); w/v (weight to volume); v/v (volume to volume); BSA (bovine serum albumin); CTAB (cetyltrimethylammonium bromide); HPLC (high pressure liquid chromatography); DNA (deoxyribonucleic acid); p (plasmid); μl (microliters); ml (milliliters); μg (micrograms); pmoles (picomoles); mg (milligrams); M (molar); mM (milliMolar); μM (microMolar); nm (nanometers); kdal (kilodaltons); OD (optical density); EDTA (ethylene diamine tetra-acetic acid); FITC (fluorescein isothiocyanate); SDS (sodium dodecyl sulfate); NaPO₄ (sodium phosphate); Tris (tris(hydroxymethyl)-aminomethane); PMSF (phenylmethylsulfonylfluoride); TAE (Tris-acetate-EDTA, i.e., 40 mM Tris-Acetate, 1 mM EDTA); TBE (Tris-Borate-EDTA, i.e., Tris buffer titrated with boric acid rather than HCl and containing EDTA); PBS (phosphate buffered saline); PPBS (phosphate buffered saline containing 1 mM PMSF); PAGE (polyacrylamide gel electrophoresis); Tween (polyoxyethylene-sorbitan); ATCC (American Type Culture Collection, Rockville, Md.); DSMZ (Deutsche Sammlung von Mikroorganismen und Zellculturen, Braunschweig, Germany); Sigma (Sigma Chemical Company, St. Louis, Mo.); Dynal (Dynal A.S., Oslo, Norway); Gull (Gull Laboratories, Salt Lake City, Utah); Epicentre (Epicentre Technologies, Madison, Wis.); MJ Research (MJ Research, Watertown, Mass.); National Biosciences (Plymouth, Minn.); New England Biolabs (Beverly, Mass.); Novagen (Novagen, Inc., Madison, Wis.); Perkin Elmer (Norwalk, Conn.); Promega Corp. (Madison, Wis.); Stratagene (Stratagene Cloning Systems, La Jolla, Calif.); Clonetech (Clonetech, Palo Alto, Calif.); Pharmacia (Pharmacia, Piscataway, N.J.); Milton Roy (Milton Roy, Rochester, N.Y.); Amersham (Amersham International, Chicago, Ill.); USB (U.S. Biochemical, Cleveland, Ohio); and Qiagen (Valencia, Calif.).

### EXAMPLE 1

[0184] Rapid screening of colonies for 5′ nuclease activity

[0185] The native 5′ nucleases and the enzymes of the present invention can be tested directly for a variety of functions. These include, but are not limited to, 5′ nuclease activity on RNA or DNA targets and background specificity using alternative substrates representing structures that may be present in a target detection reaction. Examples of nucleic acid molecules having suitable test structures are shown schematically in FIGS. 18A-D and FIGS. 21-24. The screening techniques described below were developed to quickly and efficiently characterize 5′ nucleases and to determine whether the new 5′ nucleases have any improved or desired activities. Enzymes that show improved cycling rates on RNA or DNA targets, or that result in reduced target-independent cleavage merit more thorough investigation. In general, the modified proteins developed by random mutagenesis were tested by rapid colony screen on the substrates shown in FIGS. 18A and 18B. A rapid protein extraction was then done, and a test of activity on alternative structures, (e.g., as shown in FIGS. 18C-D) was performed using the protein extract. Either the initial screen, or further screening and characterization of enzymes for improved activity may be performed using other cleavage complexes, such as those diagrammed in FIGS. 21-24. It is not intended that the scope of the invention be limited by the particular sequences used to form such test cleavage structures. One skilled in the art would understand how to design and create comparable nucleic acids to form analogous structures for rapid screening.

[0186] This order of testing may be chosen to reduce the number of tests overall, to save time and reagents. The order of testing for enzyme function is not intended to be a limitation on the present invention. Those mutants that showed reasonable cycling rates with the RNA or DNA targets may then be cultured overnight, and a rapid protein extraction done. Alternatively, any subset or all of the cleavage tests may be done at the same time.

[0187] For convenience, each type of rapid screen may be done on a separate microtiter plate. For example, one plate may be set up to test RNA INVADER activity, one plate set up to test for DNA INVADER activity. As many as 90 different colonies may be screened on one plate. The colonies screened can be from a variety of sources, such as clones of unaltered (native) 5′ nucleases, from one mutagenesis reaction (e.g., many colonies from a single plate) or from a variety of reactions (colonies selected from multiple plates).

[0188] Ideally, positive and negative controls should be run on the same plate as the mutants, using the same preparation of reagents. One example of a good positive control is a colony containing the unmodified enzyme, or a previously modified enzyme whose activity is to be compared to new mutants. For example, if a mutagenesis reaction is performed on the Taq DN RX HT construct (described below), the unmodified Taq DN RX HT construct would be chosen as the standard for comparing the effects of mutagenesis on enzymatic activity. Additional control enzymes may also be incorporated into the rapid screening test. For example, Tth DN RX HT (described below; unless otherwise specified, the TaqPol and TthPol enzymes of the following discussion refer to the DN RX HT derivative) may also be included as a standard for enzymatic activity along with the Taq DN RX HT. This would allow a comparison of any altered enzymes to two known enzymes having different activities. A negative control should also be run to determine the background reaction levels (i.e., cleavage or probe degradation due to sources other than the nucleases being compared). A good negative control colony would be one containing only the vector used in the cloning and mutagenesis, for example, colonies containing only the pTrc99A vector.

[0189] Two factors that may influence the number of colonies chosen from a specific mutagenesis reaction for the initial rapid screen are 1) total number of colonies obtained from the mutagenesis reaction, and 2) whether the mutagenesis reaction was site-specific or randomly distributed across a whole gene or a region of a gene. For example, if only 5-10 colonies are present on the plate, all colonies can easily be tested. If hundreds of colonies are present, a subset of these may be analyzed. Generally 10-20 colonies are tested from a site-specific mutagenesis reaction, while 80 to 100 or more colonies are routinely tested from a single random mutagenesis reaction.

[0190] Where indicated, the altered 5′ nucleases described in these experimental examples were tested as detailed below.

[0191] A. Rapid screen: INVADER activity on RNA target (FIG. 18A)

[0192] A 2× substrate mix was prepared, comprising 20 mM MOPS, pH 7.5, 10 mM MgSO₄, 200 mM KCl, 2 μM FRET-probe oligo SEQ ID NO:21

| | |
|---|---|
| 2 μM FRET-probe oligo | SEQ ID NO:21 |
| (5′-F1-CGCT-cy3-TCTCGCTCGC-3′), | |
| 1 μM INVADER oligo | SEQ ID NO:22 |
| (5′-ACGGAACGAGCGTCTTTG-3′) and | |
| 4 nM RNA target | SEQ ID NO:23 |
| (5′-GCG AGC GAGA CAG CGA AAG ACG CUC | |
| GUU CCG U-3′). | |

[0193] Five μl of the 2× substrate mix were dispensed into each sample well of a 96 well microtiter plate (Low Profile MULTIPLATE 96, M.J. Research, Inc.).

[0194] Cell suspensions were prepared by picking single colonies (mutants, positive control, and negative control colonies) and suspending each one in 20 μl of water. This can be done conveniently in a 96 well microtiter plate format, using one well per colony.

[0195] Five μl of the cell suspension was added to the appropriate test well such that the final reaction conditions were 10 mM MOPS, pH 7.5, 5 mM MgSO₄, 100 mM KCl, 1 μM FRET-probe oligo, 0.5 μM INVADER oligo, and 2 nM RNA target. The wells were covered with 10 μl of Clear Chill-out 14 (M.J. Research, Inc.) liquid wax, and the samples were heated at 85° C. for 3 minutes, then incubated at 59° C. for 1 hour. After the incubation, the plates were read on a Cytofluor flourescense plate reader using the following parameters: excitation 485/20, emission 530/30.

[0196] B. Rapid screen: INVADER activity on DNA target (FIG. 18B)

[0197] A 2× substrate mix was prepared, comprising 20 mM MOPS, pH 7.5, 10 mM MgSO₄, 200 mM KCl, 2 μM FRET-probe oligo

| | |
|---|---|
| 2 μM FRET-probe oligo | SEQ ID NO:21 |
| (5′-F1-CGCT-Cy3-TCTCGCTCGC-3′), | |
| 1 μM INVADER oligo | SEQ ID NO:22 |
| (5′-ACGGAACGAGCGTCTTTG-3′), | |
| 1 nM DNA target | SEQ ID NO:24 |
| (5′-GCG AGC GAGA CAG CGA AAG ACG CTC | |
| GTT CCG T-3′). | |

[0198] Five μl of the 2× substrate mix was dispensed into each sample well of a 96 well microtiter plate (MJ Low Profile).

[0199] Cell suspensions were prepared by picking single colonies (mutants, positive control and negative control colonies) and suspending them in 20 μl of water, generally in a 96 well microtiter plate format.

[0200] 5 μl of the cell suspension were added to the appropriate test well such that the final reaction conditions were 10 mM MOPS, pH 7.5, 5 mM MgSO₄, 100 mM KCl, 1 μM FRET-probe oligo, 0.5 μM INVADER oligo, and 0.5 nM DNA target. Wells were covered with 10 μl of Clear Chill-out 14 (M.J. Research, Inc.) liquid wax, and the reactions were heated at 85° C. for 3 minutes, then incubated at 59° C. for 1 hour. After the hour incubation, the plate were read on a Cytofluor flourescan plate reader using the following parameters: excitation 485/20, emission 530/30, gain 40, reads per well 10.

[0201] C. Rapid protein extraction (crude cell lysate)

[0202] Those mutants that gave a positive or an unexpected result in either the RNA or DNA INVADER assay were further analyzed, specifically for background activity on the X-structure or the hairpin substrate (FIG. 18C and D, respectively). A rapid colony screen format can be employed, as described above. By simply changing the substrate, tests for background or aberrant enzymatic activity can be done. Another approach would be to do a rapid protein extraction from a small overnight culture of positive clones, and then test this crude cell lysate for additional protein function. One possible rapid protein extraction procedure is detailed below. Two to five ml of LB (containing the appropriate antibiotic for plasmid selection; See e.g., Maniatis, books 1,2 and 3) were inoculated with the remaining volume of the 20 μl water-cell suspension and incubated at 37° C. overnight. About 1.4 ml of the culture were transferred to a 1.5 ml microcentrifuge tube, and microcentrifuged at top speed (e.g., 14,000 rpm in an Eppendorf 5417 table top microcentrifuge), at room temperature for 3-5 minutes to pellet the cells. The supernatant was removed, and the cell pellet was suspended in 100 μl of TES buffer pH 7.5 (Sigma). Lysozyme (Promega) was added to a final concentration of 0.5 μg/μl and samples were incubated at room temperature for 30 minutes. Samples were then heated at 70° C. for 10 minutes to inactivate the lysozyme, and the cell debris was pelleted by microcentrifugation at top speed for 5 minutes. The supernatant was removed and this crude cell lysate was used in the following enzymatic activity assays.

[0203] D. Rapid screen: background specificity X structure substrate (FIG. 18C)

[0204] Reactions were performed under conditions as detailed above. One μl of crude cell lysate was added to 9 μl of reaction components for a final volume of 10 μl and final concentrations of 10 mM MOPS, pH 7.5, 5 MM MgSO₄, 100 mM KCl, 1 μM FRET-probe oligo (SEQ ID NO:21), 0.5 μM X-structure INVADER oligo SEQ ID NO:25 (5′-ACGGAACGAGCGTCTTTCATCTGTCAATC-3′), and 0.5 μM DNA target (SEQ ID NO:24). Wells were covered with 10 μl of Clear Chill-out 14 (M.J. Research, Inc.) liquid wax, and the reactions were heated at 85° C. for 3 minutes, then incubated at 59° C. for 1 hour. After the incubation, the plates were read on a Cytofluor fluorescence plate reader using the following parameters: excitation 485/20, emission 530/30, gain 40, reads per well 10.

[0205] E. Rapid screen: background specificity hairpin substrate (FIG. 18D)

[0206] Reactions were performed under conditions as detailed above. One μl of crude cell lysate was added to 9 μl of reaction components for a final volume of 10 μl and final concentrations of 10 mM MOPS, pH 7.5, 5 mM MgSO₄, 100 mM KCl, 1 μM FRET-probe oligonucleotide (SEQ ID NO:21), and 0.5 nM DNA target (SEQ ID NO:24). Wells were covered with 10 μl of Clear Chill-out 14 (M.J. Research, Inc.) liquid wax, and the reactions were heated at 85° C. for 3 minutes, then incubated at 59° C. for 1 hour. After the hour incubation, the plate were read on a Cytofluor plate reader using the following parameters: excitation 485/20, emission 530/30, gain 40, reads per well 10.

[0207] F. Activity assays with IrT1 and IdT targets (FIGS. 24)

[0208] The 5′ nuclease activities assays were carried out in 10 μl of a reaction containing 10 mM MOPS, pH 7.5, 0.05% Tween 20, 0.05% Nonidet P-40, 10 μg/ml tRNA, 100 mM KCl and 5 mM MgSO₄. The probe concentration (SEQ ID NO: 26) was 2 mM. The substrates (IrT1 (SEQ ID NO: 35) or IdT (SEQ ID NO: 36) at 10 or 1 nM final concentration respectively) and approximately 20 ng of an enzyme, prepared as in Example 3, were mixed with the above reaction buffer and overlaid with Chill-out (MJ Research) liquid wax. Reactions were brought up to reaction temperature 57° C., started by addition of MgSO₄, and incubated for 10 min. Reactions were then stopped by the addition of 10 μl of 95% formamide containing 10 mM EDTA and 0.02% methyl violet (Sigma). Samples were heated to 90° C. for 1 minute immediately before electrophoresis through a 20% denaturing acrylamide gel (19:1 cross-linked), with 7 M urea, and in a buffer of 45 mM Tris-borate, pH 8.3, 1.4 mM EDTA. Unless otherwise indicated, 1 μl of each stopped reaction was loaded per lane. Gels were then scanned on an FMBIO-100 fluorescent gel scanner (Hitachi) using a 505 nm filter. The fraction of cleaved product was determined from intensities of bands corresponding to uncut and cut substrate with FMBIO Analysis software (version 6.0, Hitachi). The fraction of cleavage product did not exceed 20% to ensure that measurements approximated initial cleavage rates. The turnover rate was defined as the number of cleaved signal probes generated per target molecule per minute under these reaction conditions (1/min).

[0209] G. Activity assays with X structure (X) and hairpin (HP) targets (FIGS. 22)

[0210] The 5′ nuclease activity assays were carried out in 10 μl of a reaction containing 10 mM MOPS, pH 7.5, 0.05% Tween 20, 0.05% Nonidet P-40, 10 μg/ml tRNA, 100 mM KCl and 5 mM MgSO₄. Each oligo for formation of either the hairpin structure assembly (22A, SEQ ID NOS: 29 and 30) assembly or the X structure assembly (22B, SEQ ID NOS: 29-31) was added to a final concentration of 1 μm, and approximately 20 ng of test enzyme prepared as described in Example 3, were mixed with the above reaction buffer and overlaid with Chill-out (MJ Research) liquid wax. Reactions were brought up to reaction temperature 60° C., started by addition of MgSO₄, and incubated for 10 min. Reactions were then stopped by the addition of 10 μl of 95% formamide containing 10 mM EDTA and 0.02% methyl violet (Sigma). Samples were heated to 90° C. for 1 minute immediately before electrophoresis through a 20% denaturing acrylamide gel (19:1 cross-linked), with 7 M urea, and in a buffer of 45 mM Tris-borate, pH 8.3, 1.4 mM EDTA. Unless otherwise indicated, 1 μl of each stopped reaction was loaded per lane. Gels were then scanned on an FMBIO-100 fluorescent gel scanner (Hitachi) using a 505 nm filter. The fraction of cleaved product was determined from intensities of bands corresponding to uncut and cut substrate with FMBIO Analysis software (version 6.0, Hitachi). The fraction of cleavage product did not exceed 20% to ensure that measurements approximated initial cleavage rates. The turnover rate was defined as the number of cleaved signal probes generated per target molecule per minute under these reaction conditions (1/min).

[0211] H. Activity assays with human IL-6 target (FIG. 10)

[0212] The 5′ nuclease activities assays were carried out in 10 μl reactions containing 10 mM MOPS, pH 7.5, 0.05% Tween 20, 0.05% Nonidet P-40, 10 μg/ml tRNA, 100 mM KCl and 5 mM MgSO₄. Reactions comprising the DNA IL-6 substrate contained 0.05 nM IL-6 DNA target (SEQ ID NO: 18) and 1 μM of each probe (SEQ ID NO: 16) and INVADER (SEQ ID NO: 15) oligonucleotides, and were carried out at 60° C. for 30 min. Reactions comprising the IL-6 RNA target (SEQ ID NO: 17) were performed under the same conditions, except that the IL-6 RNA target concentration was 1 nM and the reactions were performed at 57° C. for 60 min. Each reaction contained approximately 20 ng of test enzyme, prepared as described in Example 3.

[0213] I. Activity assays with synthetic r25mer target (FIG. 23)

[0214] Reactions comprising the synthetic r25mer target (SEQ ID NO: 34) were carried out under the same reaction conditions (10 mM MOPS, pH 7.5, 0.05% Tween 20, 0.05% Nonidet P-40, 10 μg/ml tRNA, 100 mM KCl and 5 mM MgSO₄) and 1 μM of each probe (SEQ ID NO: 32) and INVADER (SEQ ID NO: 33) oligonucleotides, except that the r25mer target concentration was 5 μM and the reactions were performed at 58° C. for 60 min. Approximately 20 ng of each test enzyme was added to the reactions. Enzymes were prepared as described in Example 3.

[0215] Any of the tests described above can be modified to derive the optimal conditions for enzymatic activity. For example, enzyme titrations can be done to determine the optimal enzyme concentration for maximum cleavage activity, and lowest background signal. By way of example, but not by way of limitation, many of the mutant enzymes were tested at 10, 20 and 40 ng amounts. Similarly, a temperature titration can also be incorporated into the tests. Since modifying the structure of a protein can alter its temperature requirements, a range of temperatures can be tested to identify the condition best suited for the mutant in question.

[0216] Examples of the results from such screens (using approximately 20 ng of the mutant enzyme) are shown in Tables 2-7, and FIGS. 12, 14, 15, 19, and 25.

### EXAMPLE 2

[0217] Cloning and Expression of 5′ nucleases of DNA polymerases and mutant polymerases

[0218] A. DNA polymerases of Thermus aquaticus and Thermus thermophilus

[0219] 1. Cloning of TaqPol and TthPol

[0220] Type A DNA polymerases from eubacteria of the genus Thermus share extensive protein sequence identity (90% in the polymerization domain, using the Lipman-Pearson method in the DNA analysis software from DNAStar, Wis.) and behave similarly in both polymerization and nuclease assays. Therefore, the genes for the DNA polymerase of Thermus aquaticus (TaqPol), Thermus thermophilus (TthPol) and Thermus scotoductus were used as representatives of this class. Polymerase genes from other eubacterial organisms, including, but not limited to, Escherichia coli, Streptococcus pneumoniae, Mycobacterium smegmatis, Thermus thermophilus, Thermus sp., Thermotoga maritima, Thermosipho africanus, and Bacillus stearothermophilus are equally suitable.

[0221] a. Initial TaqPol Isolation: mutant TaqA/G

[0222] The Taq DNA polymerase gene was amplified by polymerase chain reaction from genomic DNA from Thermus aquaticus, strain YT-1 (Lawyer et al., supra), using as primers the oligonucleotides described in SEQ ID NOS:37 and 38. The resulting fragment of DNA has a recognition sequence for the restriction endonuclease EcoRI at the 5′ end of the coding sequence and a BglII sequence at the 3′ end of the coding strand. Cleavage with BglII leaves a 5′ overhang or “sticky end” that is compatible with the end generated by BamHI. The PCR-amplified DNA was digested with EcoRI and BamHI. The 2512 bp fragment containing the coding region for the polymerase gene was gel purified and then ligated into a plasmid that contains an inducible promoter.

[0223] In one embodiment of the invention, the pTTQ18 vector, which contains the hybrid trp-lac (tac) promoter, was used (M. J. R. Stark, Gene 5:255 [1987]). The tac promoter is under the control of the E. coli lac repressor protein. Repression allows the synthesis of the gene product to be suppressed until the desired level of bacterial growth has been achieved, at which point repression is removed by addition of a specific inducer, isopropyl-b-D-thiogalactopyranoside (IPTG). Such a system allows the controlled expression of foreign proteins that may slow or prevent growth of transformants.

[0224] Particularly strong bacterial promoters, such as the synthetic Ptac, may not be adequately suppressed when present on a multiple copy plasmid. If a highly toxic protein is placed under control of such a promoter, the small amount of expression leaking through, even in the absence of an inducer, can be harmful to the bacteria. In another embodiment of the invention, another option for repressing synthesis of a cloned gene product is contemplated. A non-bacterial promoter from bacteriophage T7, found in the plasmid vector series pET-3, was used to express the cloned mutant Taq polymerase genes (Studier and Moffatt, J. Mol. Biol., 189:113 [1986]). This promoter initiates transcription only by T7 RNA polymerase. In a suitable strain, such as BL21(DE3)pLYS, the gene for the phage T7 RNA polymerase is carried on the bacterial genome under control of the lac operator. This arrangement has the advantage that expression of the multiple copy gene (on the plasmid) is completely dependent on the expression of T7 RNA polymerase, which is easily suppressed because it is present in a single copy.

[0225] These are just two examples of vectors having suitable inducible promoters. Others are well known to those skilled in the art, and it is not intended that the improved nucleases of the present invention be limited by the choice of expression system.

[0226] For ligation into the pTTQ18 vector, the PCR product DNA containing the Taq polymerase coding region (termed mutTaq for reasons discussed below, SEQ ID NO:39) was digested with EcoRI and BglII and this fragment was ligated under standard “sticky end” conditions (Sambrook et al. Molecular Cloning, Cold Spring Harbor Laboratory Press, Cold Spring Harbor, pp. 1.63-1.69 [1989]) into the EcoRI and BamHI sites of the plasmid vector pTTQ 18. Expression of this construct yields a translational fusion product in which the first two residues of the native protein (Met-Arg) are replaced by three from the vector (Met-Asn-Ser), but the remainder of the PCR product's protein sequence is not changed (SEQ ID NO:40). The construct was transformed into the JM109 strain of E. coli, and the transformants were plated under incompletely repressing conditions that do not permit growth of bacteria expressing the native protein. These plating conditions allow the isolation of genes containing pre-existing mutations, such as those that result from the infidelity of Taq polymerase during the amplification process.

[0227] Using this amplification/selection protocol, a clone was isolated containing a mutated Taq polymerase gene (mutTaq). The mutant was first detected by its phenotype, in which temperature-stable 5′ nuclease activity in a crude cell extract was normal, but polymerization activity was almost absent (approximately less than 1% of wild type Taq polymerase activity). Polymerase activity was determined by primer extension reactions. The reactions were carried out in 10 μl of buffer containing 10 mM MOPS, pH 7.5, 5 mM MgSO₄, 100 mM KCl. In each reaction, 40 ng of enzyme were used to extend 10 μM (dT)₂₅₋₃₀ primer in the presence of either 10 μM poly (A)₂₈₆ or 1 μM poly (dA)273 template, 45 μM dTTP and 5 μM F1-dUTP at 60° C. for 30 minutes. Reactions were stopped with 10 μl of stop solution (95% formamide, 10 mM EDTA, 0.02% methyl violet dye). Samples (3 μl) were fractionated on a 15% denaturing acrylamide gel (19:1 crossed-linked) and the fraction of incorporated F1-dUTP was quantitated using an FMBIO-100 fluorescence gel scanner (Hitachi) equipped with a 505 nm emission filter.

[0228] DNA sequence analysis of the recombinant gene showed that it had changes in the polymerase domain resulting in two amino acid substitutions: an A to G change at nucleotide position 1394, which causes a Glu to Gly change at amino acid position 465 (numbered according to the natural nucleic and amino acid sequences, SEQ ID NOS:1 and 4), and another A to G change at nucleotide position 2260, which causes a Gln to Arg change at amino acid position 754. Because the Gln to Gly mutation is at a nonconserved position and because the Glu to Arg mutation alters an amino acid that is conserved in virtually all of the known Type A polymerases, the latter mutation is most likely the one responsible for curtailing the synthesis activity of this protein. The nucleotide sequence for the construct is given in SEQ ID NO:39. The enzyme encoded by this sequence is referred to as Taq A/G.

[0229] b. Initial TthPol Isolation

[0230] The DNA polymerase enzyme from the bacterial species Thermus thermophilus (Tth) was produced by cloning the gene for this protein into an expression vector and overproducing it in E. coli cells. Genomic DNA was prepared from 1 vial of dried Thermus thermophilus strain HB-8 from ATCC (ATCC #27634). The DNA polymerase gene was amplified by PCR using the following primers:

| | |
|---|---|
| 5′-CACGAATTCCGAGGCGATGCTTCCGCTC-3′ | (SEQ ID NO:41) |
| | and |
| 5′-TCGACGTCGACTAACCCTTGGCGGAAAGCC-3′ | (SEQ ID |
| | NO:42). |

[0231] The resulting PCR product was digested with EcoRI and SalI restriction endonucleases and inserted into EcoRI/Sal I digested plasmid vector pTrc99G (described in Example 2C1) to create the plasmid pTrcTth-1. This Tth polymerase construct is missing a single nucleotide that was inadvertently omitted from the 5′ oligonucleotide, resulting in the polymerase gene being out of frame. This mistake was corrected by site specific mutagenesis of pTrcTth-1 as described in Examples 4 and 5 using the following oligonucleotide: 5′-GCATCGCCTCGGAATTCATGGTC-3′ (SEQ ID NO:43), to create the plasmid pTrcTth-2. The protein and the nucleic acid sequence encoding the protein are referred to as TthPol, and are listed as SEQ ID NOS:6 and 3 respectively.

[0232] c. Large Scale preparation of recombinant proteins

[0233] The recombinant proteins were purified by the following technique which is derived from a Taq DNA polymerase preparation protocol (Engelke et al., Anal. Biochem., 191:396 [1990]) as follows. E. coli cells (strain JM109) containing either pTrc99A TaqPol, pTrc99GTthPol were inoculated into 3 ml of LB containing 100 mg/ml ampicillin and grown for 16 hrs at 37° C. The entire overnight culture was inoculated into 200 ml or 350 ml of LB containing 100 mg/ml ampicillin and grown at 37° C. with vigorous shaking to an A₆₀₀ of 0.8. IPTG (1 M stock solution) was added to a final concentration of 1 mM and growth was continued for 16 hrs at 37° C.

[0234] The induced cells were pelleted and the cell pellet was weighed. An equal volume of 2× DG buffer (100 mM Tris-HCl, pH 7.6, 0.1 mM EDTA) was added and the pellet was suspended by agitation. Fifty mg/ml lysozyme (Sigma) were added to 1 mg/ml final concentration and the cells incubated at room temperature for 15 min. Deoxycholic acid (10% solution) was added dropwise to a final concentration of 0.2 % while vortexing. One volume of H₂O and 1 volume of 2× DG buffer were added, and the resulting mixture was sonicated for 2 minutes on ice to reduce the viscosity of the mixture. After sonication, 3 M (NH₄)₂SO₄ was added to a final concentration of 0.2 M, and the lysate was centrifuged at 14000× g for 20 min at 4° C. The supernatant was removed and incubated at 70° C. for 60 min at which time 10% polyethylimine (PEI) was added to 0.25%. After incubation on ice for 30 min., the mixture was centrifuged at 14,000× g for 20 min at 4° C. At this point, the supernatant was removed and the protein precipitated by the addition of (NH₄)₂SO₄ as follows.

[0235] Two volumes of 3 M (NH₄)₂SO₄ were added to precipitate the protein. The mixture was incubated overnight at room temperature for 16 hrs centrifuged at 14,000× g for 20 min at 4° C. The protein pellet was suspended in 0.5 ml of Q buffer (50 mM Tris-HCl, pH 8.0, 0.1 mM EDTA, 0.1% Tween 20). For the Mja FEN-1 preparation, solid (NH₄)₂SO₄ was added to a final concentration of 3 M (˜75% saturated), the mixture was incubated on ice for 30 min, and the protein was spun down and suspended as described above.

[0236] The suspended protein preparations were quantitated by determination of the A₂₇₉ dialyzed and stored in 50% glycerol, 20 mM Tris HCl, pH8.0, 50 mM KCl, 0.5% Tween 20, 0.5% Nonidet P-40, with 100 μg/ml BSA.

[0237] B. DNA polymerases of Thermus filiformis and Thermus scotoductus

[0238] 1. Cloning of Thermus filiformis and Thermus scotoductus

[0239] One vial of lyophilized Thermus filiformis (Tfi) obtained from DSMZ (Deutsche Sammlung von Mikroorganismen und Zellculturen, Braunschweig, Germany, strain #4687) was rehydrated in 1 ml of Castenholz medium (DSMZ medium 86) and inoculated into 500 ml of Castenholz medium preheated to 50° C. The culture was incubated at 70° C. with vigorous shaking for 48 hours. After growth, the cells were harvested by centrifugation at 8000× g for 10 minutes, the cell pellet was suspended in 10 ml of TE (10 mM TrisHCL, pH 8.0, 1 mM EDTA), and the cells were frozen at −20° C. in 1 ml aliquots. A 1 ml aliquot was thawed, lysozyme was added to 1 mg/ml, and the cells were incubated at 23° C. for 30 minutes. A solution of 20% SDS (sodium dodecyl sulfate) was added to a final concentration of 0.5% followed by extraction with buffered phenol. The aqueous phase was further extracted with 1:1 phenol:chloroform, and extracted a final time with chloroform. One-tenth volume of 3 M sodium acetate, pH 5.0 and 2.5 volumes of ethanol were added to the aqueous phase and mixed. The DNA was pelleted by centrifugation at 20,000× g for 5 minutes. The DNA pellet was washed with 70% ethanol, air dried and resuspended in 200 μl of TE and used directly for amplification. Thermus scotoductus (Tsc, ATCC # 51532) was grown and genomic DNA was prepared as described above for Thermus filiformis.

[0240] The DNA polymerase I gene from Tfi (GenBank accession #AF030320) could not be amplified as a single fragment. Therefore, it was cloned in 2 separate fragments into the expression vector pTrc99a. The 2 fragments overlap and share a Not I site which was created by introducing a silent mutation at position 1308 of the Tfi DNA polymerase open reading frame (ORF) in the PCR oligonucleotides. The 3′ half of the gene was amplified using the Advantage cDNA PCR kit (Clonetech) with the following oligonucleotides;

| | |
|---|---|
| 5′-ATAGCCATGGTGGAGCGGCCGCTCTCCCGG | (SEQ ID |
| | NO:44) and |
| 5′-AAGCGTCGACTCAATCCTGCTTCGCCTCCAGCC | (SEQ ID |
| | NO:45). |

[0241] The PCR product from this reaction was approximately 1200 base pairs in length. It was cut with the restriction enzymes Not I and Sal I, and the resulting DNA was ligated into pTrc99a cut with NotI and SalI to create pTrc99a-Tfi3′. The 5′ half of the gene was amplified as described above using the following two primers;

| | |
|---|---|
| 5′AATCGAATTCACCCCACTTTTTGACCTGGAGG | (SEQ ID NO:46) |
| | and |
| 5′-CCGGGAGAGCGGCCGCTCCAC | (SEQ ID NO:47). |

[0242] The resulting 1300 base pair fragment was cut with restriction enzymes Eco RI and Not I and ligated into pTrc99a-Tfi3′ cut with NotI and EcoRI to produce pTrc99a-TfiPol, SEQ ID NO:48 (the corresponding amino acid sequence is listed in SEQ ID NO:155).

[0243] The DNA polymerase I gene from Thermus scotoductus was amplified using the Advantage cDNA PCR kit (Clonetech) using the following two primers;

| | |
|---|---|
| 5′-ACTGGAATTCCTGCCCCTCTTTGAGCCCAAG | (SEQ ID NO:49) |
| | and |
| 5′-AACAGTCGACCTAGGCCTTGGCGGAAAGCC | (SEQ ID NO:50). |

[0244] The PCR product was cut with restriction enzymes Eco RI and Sal I and ligated into Eco RI, Sal I cut pTrc99a to create pTrc99a-TscPol SEQ ID NO:51 (the corresponding amino acid sequence is listed in SEQ ID NO:268).

[0245] 2. Expression and purification of Thermus filiformis and Thermus scotoductus

[0246] Plasmids were transformed into protease deficient E. coli strain BL21 (Novagen) or strain JM109 (Promega Corp., Madison, Wis.) for protein expression. Flasks containing 200 ml of LB containing 100 μg/ml ampicillin were inoculated with either a single colony from an LB plate or from a frozen stock of the appropriate strain. After several hours of growth at 37° C. with vigorous shaking, cultures was induced by the addition of 200 μl of 1 M isothiopropyl-galatoside (IPTG). Growth at 37° C. was continued for 16 hours prior to harvest. Cells were pelleted by centrifugation at 8000× g for 15 minutes followed by suspension of the cell pellet in 5 ml of TEN (10 mM TrisHCl, pH 8.0, 1 mM EDTA, 100 mM NaCl). 100 μl of 50 mg/ml lysozyme were added and the cells incubated at room temperature for 15 minutes. Deoxycholic acid (10%) was added to a final concentration of 0.2%. After thorough mixing, the cell lysates were sonicated for 2 minutes on ice to reduce the viscosity of the mixture. Cellular debris was pelleted by centrifugation at 4° C. for 15 minutes at 20,000× g. The supernatant was removed and incubated at 70° C. for 30 min after which 10% polyethylimine (PEI) was added to 0.25%. After incubation on ice for 30 minutes, the mixture was centrifuged at 20,000× g for 20 min at 4° C. At this point, the supernatant containing the enzyme was removed, and the protein was precipitated by the addition of 1.2 g of ammonium sulfate and incubation at 4° C. for 1 hour. The protein was pelleted by centrifugation at 4° C. for 10 minutes at 20,000× g. The pellet was resuspended in 4 ml of HPLC Buffer A (50 mM TrisHCl, pH 8.0, 1 mM EDTA). The protein was further purified by affinity chromatography using an Econo-Pac heparin cartridge (Bio-Rad) and a Dionex DX 500 HPLC instrument. Briefly, the cartridge was equilibrated with HPLC Buffer A, and the enzyme extract was loaded on the column and eluted with a linear gradient of NaCl (0-2 M) in the same buffer. Pure protein elutes between 0.5 and 1 M NaCl. The enzyme peak was collected and dialyzed in 50% glycerol, 20 mM Tris HCl, pH 8, 50 mM KCl, 0.5% Tween 20, 0.5% Nonidet P40, 100 mg/ml BSA.

[0247] C. Generation of polymerase mutants with reduced polymerase activity but unaltered 5′ nuclease activity

[0248] All mutants generated in section C were expressed and purified as described in Example 2A1C.

[0249] 1. Modified TaqPol Genes: TaqDN

[0250] A polymerization deficient mutant of Taq DNA polymerase called TaqDN was constructed. TaqDN nuclease contains an asparagine residue in place of the wild-type aspartic acid residue at position 785 (D785N).

[0251] DNA encoding the TaqDN nuclease was constructed from the gene encoding the Taq A/G in two rounds of site-directed mutagenesis. First, the G at position 1397 and the G at position 2264 of the Taq A/G gene (SEQ ID NO:39) were changed to A at each position to recreate a wild-type TaqPol gene. In a second round of mutagenesis, the wild type TaqPol gene was converted to the Taq DN gene by changing the G at position 2356 to A. These manipulations were performed as follows.

[0252] DNA encoding the Taq A/G nuclease was recloned from pTTQ18 plasmid into the pTrc99A plasmid (Pharmacia) in a two step procedure. First, the pTrc99A vector was modified by removing the G at position 270 of the pTrc99A map, creating the pTrc99G cloning vector. To this end, pTrc99A plasmid DNA was cut with NcoI and the recessive 3′ ends were filled-in using the Klenow fragment of E. coli polymerase I in the presence of all four dNTPs at 37° C. for 15 min. After inactivation of the Klenow fragment by incubation at 65° C. for 10 min, the plasmid DNA was cut with EcoRI and the ends were again filled-in using the Klenow fragment in the presence of all four dNTPs at 37° C. for 15 min. The Klenow fragment was then inactivated by incubation at 65° C. for 10 min. The plasmid DNA was ethanol precipitated, recircularized by ligation, and used to transform E. coli JM109 cells (Promega). Plasmid DNA was isolated from single colonies, and deletion of the G at position 270 of the pTrc99A map was confirmed by DNA sequencing.

[0253] In a second step, DNA encoding the Taq A/G nuclease was removed from the pTTQ18 plasmid using EcoRI and SalI and the DNA fragment carrying the Taq A/G nuclease gene was separated on a 1% agarose gel and isolated with Geneclean II Kit (Bio 101, Vista, Calif.). The purified fragment was ligated into the pTrc99G vector which had been cut with EcoRI and SalI. The ligation mixture was used to transform competent E. coli JM109 cells (Promega). Plasmid DNA was isolated from single colonies and insertion of the Taq A/G nuclease gene was confirmed by restriction analysis using EcoRI and SalI.

[0254] Plasmid DNA pTrcAG carrying the Taq A/G nuclease gene cloned into the pTrc99A vector was purified from 200 ml of JM109 overnight culture using QIAGEN Plasmid Maxi kit (QIAGEN, Chatsworth, Calif.) according to manufacturer's protocol. pTrcAG plasmid DNA was mutagenized using two mutagenic primers, E465 (SEQ ID NO:52) (Integrated DNA Technologies, Iowa) and R754Q (SEQ ID NO:53) (Integrated DNA Technologies), and the selection primer Trans Oligonucleotide AlwNI/Spel (Clontech, Palo Alto, Calif., catalog #6488-1) according to TRANSFORMER Site-Directed Mutagenesis Kit protocol (Clontech, Palo Alto, Calif.) to produce a restored wild-type TaqPol gene (pTrcWT).

[0255] pTrcWT plasmid DNA carrying the wild-type TaqPol gene cloned into the pTrc99A vector was purified from 200 ml of JM109 overnight culture using QIAGEN Plasmid Maxi kit (QIAGEN, Chatsworth, Calif.) according to manufacturer's protocol. pTrcWT was then mutagenized using the mutagenic primer D785N (SEQ ID NO:54) (Integrated DNA Technologies) and the selection primer Switch Oligonucleotide SpeI/AlwNI (Clontech, Palo Alto, Calif., catalog #6373-1) according to TRANSFORMER Site-Directed Mutagenesis Kit protocol (Clontech, Palo Alto, Calif.) to create a plasmid containing DNA encoding the Taq DN nuclease. The DNA sequence encoding the Taq DN nuclease is provided in SEQ ID NO:55; the amino acid sequence of Taq DN nuclease is provided in SEQ ID NO:56.

[0256] 2. Modified TthPol Gene: Tth DN

[0257] The Tth DN construct was created by mutating the TthPol described above. The sequence encoding an aspartic acid at position 787 was changed by site-specific mutagenesis as described above to a sequence encoding asparagine. Mutagenesis of pTrcTth-2 with the following oligonucleotide: 5′-CAGGAGGAGCTCGTTGTGGACCTGGA-3′ (SEQ ID NO:57) was performed to create the plasmid pTrcTthDN. The mutant protein and protein coding nucleic acid sequence is termed TthDN SEQ ID NOS:58 and 59 respectively.

[0258] 3. Taq DN HT and Tth DN HT

[0259] Six amino acid histidine tags (his-tags) were added onto the carboxy termini of Taq DN and Tth DN. The site-directed mutagenesis was performed using the TRANSFORMER Site Directed Mutagenesis Kit (Clontech) according to the manufacturer's instructions. The mutagenic oligonucleotides used on the plasmids pTaq DN and pTth DN were sequence 117-067-03,

| | |
|---|---|
| 5′-TCTAGAGGATCTATCAGTGGTGGTGGTGGTGGTGCTCCTTGGCGGAGAGC-3′ | (SEQ ID NO:60) and |
| 5′-TGCCTGCAGGTCGACGCTAGCTAGTGGTGGTGGTGGTGGTGACCCTTGGCGGAAAGCC-3′ | (SEQ ID NO:61), |

[0260] sequence 136-037-05. The selection primer Trans Oligo AlwNI/Spel (Clontech, catalog # 6488-1) was used for both mutagenesis reactions. The resulting mutant genes were termed Taq DN HT (SEQ ID NO:62, nucleic acid sequence; SEQ ID NO:63, amino acid sequence) and Tth DN HT (SEQ ID NO:64, nucleic acid sequence; SEQ ID NO:65, amino acid sequence).

[0261] 4. Purification of Taq DN HT and Tth DN HT

[0262] Both Taq DN HT and Tth DN HT proteins were expressed in E. coli strain JM109 as described in Example 2B2. After ammonium sulfate precipitation and centrifugation, the protein pellet was suspended in 0.5 ml of Q buffer (50 mM Tris-HCl, pH 8.0, 0.1 mM EDTAm 0.1% Tween 20). The protein was further purified by affinity chromatography using His-Bind Resin and Buffer Kit (Novagen) according to the manufacturer's instructions. 1 ml of His-Bind resin was transferred into a column, washed with 3 column volumes of sterile water, charged with 5 volumes of 1× Charge Buffer, and equilibrated with 3 volumes of 1× Binding Buffer. Four ml of 1× Binding Buffer was added to the protein sample and the sample solution was loaded onto the column. After washing with 3 ml of 1× Binding Buffer and 3 ml of 1× Wash Buffer, the bound His-Tag protein was eluted with 1 ml of 1× Elute Buffer. The pure enzyme was then dialyzed in 50% glycerol, 20 mM Tris-HCl, pH 8.0, 50 mM KCl, 0.5% Tween 20, 0.5% Nonidet P40, and 100 μg.ml BSA. Enzyme concentrations were determined by measuring absorption at 279 mn.

### EXAMPLE 3

[0263] RNA-dependent 5′ nuclease activity of TthPol can be conferred on TaqPol by transfer of the N-terminal portion of the DNA polymerase domain

[0264] A. Preparation and purification of substrate structures having either a DNA or an RNA target strand

[0265] The downstream (SEQ ID NO:16) and upstream probes (SEQ ID NO:15) and the IL-6 DNA (SEQ ID NO:18) (FIG. 10) target strand were synthesized on a PerSeptive Biosystems instrument using standard phosphoramidite chemistry (Glen Research). The synthetic RNA-DNA chimeric IrT target labeled with biotin at the 5′-end (FIG. 20A) was synthesized utilizing 2′-ACE RNA chemistry (Dharmacon Research). The 2′-protecting groups were removed by acid-catalyzed hydrolysis according to the manufacturer's instructions. The downstream probes labeled with 5′-fluorescein (Fl) or 5′-tetrachloro-fluorescein (TET) at their 5′ ends were purified by reverse phase HPLC using a Resource Q column (Amersham-Pharmacia Biotech). The 648-nucleotide IL-6 RNA target (SEQ ID NO:17) (FIG. 10) was synthesized by T7 RNA polymerase runoff-transcription of the cloned fragment of human IL-6 cDNA (nucleotides 64-691 of the sequence published in May et al., Proc. Natl. Acad. Sci., 83:8957 [1986]) using a Megascript Kit (Ambion). All oligonucleotides were finally purified by separation on a 20% denaturing polyacrylamide gel followed by excision and elution of the major band. Oligonucleotide concentration was determined by measuring absorption at 260 mn. The biotin labeled IrT target was incubated with a 5-fold excess of streptavidin (Promega) in a buffer containing 10 mM MOPS, pH 7.5, 0.05% Tween 20, 0.05% NP-40 and 10 μg/ml tRNA at room temperature for 10 min.

[0266] B. Introduction of restriction sites to make chimeras

[0267] The restriction sites used for formation of chimerical proteins, described below, were chosen for convenience. The restriction sites in the following example have been strategically placed to surround regions shown by crystal structure and other analysis to be functional domains (See, FIGS. 6, 7, and 19). Different sites, either naturally occurring or created via directed mutagenesis can be used to make similar constructs with other Type A polymerase genes from related organisms. It is desirable that the mutations all be silent with respect to protein function. By studying the nucleic acid sequence and the amino acid sequence of the protein, one can introduce changes in the nucleic acid sequence that have no effect on the corresponding amino acid sequence. If the nucleic acid change required affects an amino acid, one can make the alteration such that the new amino acid has the same or similar characteristics of the one replaced. If neither of these options is possible, one can test the mutant enzyme for function to determine if the nucleic acid alteration caused a change in protein activity, specificity or function. It is not intended that the invention be limited by the particular restriction sites selected or introduced for the creation of the improved enzymes of the present invention.

[0268] C. Generation of Tth DN RX HT and Taq DN RX HT

[0269] Mutagenesis was performed to introduce 3 additional, unique restriction sites into the polymerase domain of both the Taq DN HT and Tth DN HT enzymes. Site specific mutagenesis was performed using the Transformer Site-Directed Mutagenesis Kit from (Clonetech) according to manufacturer's instructions. One of two different selection primers, Trans Oligo AlwNI/Spel or Switch Oligo SpeI/AlwNI (Clontech, Palo Alto Calif. catalog #6488-1 or catalog #6373-1) was used for all mutagenesis reactions described. The selection oligo used in a given reaction is dependent on the selection restriction site present in the vector. All mutagenic primers were synthesized by standard synthetic chemistry. Resultant colonies were expressed in E. coli strain JM109.

[0270] The Not I sites (amino acid position 328) were created using the mutagenic primers

| | |
|---|---|
| 5′-gccgccaggggcggccgcgtccaccgggcc | (SEQ ID NO:66) |
| | and |
| 5′-gcctgcaggggcggccgcgtgcaccggggca | (SEQ ID NO:67) |

[0271] corresponding to the sense strands of the Taq DN HT and the Tth DN HT genes, respectively. The BstI (amino acid position 382) and NdeI (amino acid position 443) sites were introduced into both genes using sense strand mutagenic primes

| | |
|---|---|
| 5′-ctcctggacccttcgaacaccacccc | (SEQ ID NO:68) and |
| 5′-gtcctggcccatatggaggccac | (SEQ ID NO:69). |

[0272] The mutant plasmids were over-expressed and purified using Qiagen QiaPrep Spin Mini Prep Kit (cat. # 27106). The vectors were tested for the presence of the restriction sites by DNA sequencing and restriction mapping. These constructs are termed Tth DN RX HT (DNA sequence SEQ ID NO:70; amino acid sequence SEQ ID NO:72) and Taq DN RX HT (DNA sequence SEQ ID NO:71; amino acid sequence SEQ ID NO:73).

[0273] D. Chimeras

[0274] The chimeric constructs shown in FIG. 19 were created by exchanging homologous DNA fragments defined by the restriction endonuclease sites EcoRI (E) and BamHI (B), common for both genes, the cloning vector site SalI (S) and the new sites, NotI (N), BstBI (Bs), NdeI (D) created at the homologous positions of both genes by site directed mutagenesis. In generating these chimeric enzymes, two different pieces of DNA are ligated together to yield the final construct. The larger piece of DNA that contains the plasmid vector as well as part of the Taq or Tth (or parts of both) sequence will be termed the “vector.” The smaller piece of DNA that contains sequences of either the Taq or Tth (or parts of both) polymerase will be termed the “insert.”

[0275] All restriction enzymes were from New England Biolabs or Promega and used in reactions with the accompanying buffer, according to the manufacturer's instructions. Reactions were done in 20 μl volume with about 500 ng of DNA per reaction, at the optimal temperature for the specified enzyme. More than one enzyme was used in a single reaction (double digest) if the enzymes were compatible with respect to reaction buffer conditions and reaction temperature. If the enzymes in question were not compatible with respect to buffer conditions, the enzyme requiring the lowest salt condition was used first. After the completion of that reaction, buffer conditions were changed to be optimal or better suited to the second enzyme, and the second reaction was performed. These are common restriction enzyme digest strategies, well known to those in the art of basic molecular biology (Maniatis, supra).

[0276] The digested restriction fragments were gel isolated for optimal ligation efficiency. Two μl of 10× loading dye (50% glycerol, 1× TAE, 0.5% bromophenol blue) were added to the 20 μl reaction. The entire volume was loaded and run on a 1%, 1× TAE agarose gel containing 1 μl of a 1% ethidium bromide solution per 100 ml of agarose gel solution. The digested fragments were visualized under UV light, and the appropriate fragments (as determined by size) were excised from the gel. These fragments were then purified using the Qiagen Gel Extractio Kit, (cat # 28706) according to the manufacturer's instructions.

[0277] Ligations were performed in a 10 μl volume, using 400 units per reaction of T4 DNA Ligase enzyme from New England Biolabs (catalog #202L), with the accompanying reaction buffer. Ligation reactions were done at room temperature for 1 hour, with 1 μl of each of the Qiagen-purified fragments (approximately 20-50 ng of each DNA, depending on recovery from the gel isolation). Ligation products were then transformed into E. coli strain JM 109 and plated onto an appropriate growth and selection medium, such as LB with 100 μg/ml of ampicillin to select for transformants.

[0278] For each ligation reaction, six transformants were tested to determine if the desired construct was present. Plasmid DNA was purified and isolated using the QiaPrep Spin Mini Prep Kit, according to manufacturer's instructions. The constructs were verified by DNA sequencing and by restriction mapping.

[0279] Expression and purification of the chimeric enzymes was done as follows. Plasmids were transformed into E. coli strain JM109 (Promega). Log phase cultures (200 ml) of JM109 were induced with 0.5 mM IPTG (Promega) and grown for an additional 16 hours prior to harvest. Crude extracts containing soluble proteins were prepared by lysis of pelleted cells in 5 ml of 10 mM Tris-HCl, pH 8.3, 1 mM EDTA, 0.5mg/ml lysozyme during incubation at room temperature for 15 minutes. The lysate was mixed with 5 ml of 10 mM Tris-HCl pH 7.8, 50 mM KCl, 1 mM EDTA, 0.5% Tween 20, 0.5% Nonidet P-40, heated at 72° C. for 30 minutes, and cell debris was removed by centrifugation at 12,000× g for 5 minutes. Final purification of the protein was done by affinity chromatograpy using an Econo-Pac heparin cartridge (Bio-Rad) and Dionex DX 500 HPLC instrument. Briefly, the cartridge was equilibrated with 50 mM Tris-HCl pH 8, 1 mM EDTA, and an enzyme extract dialyzed against the same buffer was loaded on the column and eluted with a linear gradient of NaCl (0-2 M) in the same buffer. The HPLC-purified protein was dialyzed and stored in 50% (vol/vol) glycerol, 20 mM Tris-HCl pH 8.0, 50 mM KCl, 0.5% Tween 20, 0.5% Nonidet P-40, and 100 μg/m BSA. The enzymes were purified to homogeneity according to SDS-PAGE, and the enzyme concentrations were determined by measuring absorption at 279 nm.

[0280] 1. Construction of TaqTth(N) and TthTaq(N)

[0281] The first exchange that was performed involved the polymerase domains of the two enzymes. Separation of the nuclease domain (the N-terminal end of the protein) from the polymerase domain (the C-terminal portion of the protein) was accomplished by cutting both genes with the restriction endonucleases EcoRI and NotI. The approximately 900 base pair fragment from the Tth DN RX HT gene was cloned into the homologous sites of the Taq DN RX HT gene, and the approximately 900 base pair fragment from the Taq DN RX HT gene was cloned into the homologous sites of the Tth DN RX HT gene, yielding two chimeras, TaqTth(N) (DNA sequence SEQ ID NO:74; amino acid sequence SEQ ID NO:75) which has the Taq DN RX HT 5′ nuclease domain and the Tth DN RX HT polymerase domain, and TthTaq(N) (DNA sequence SEQ ID NO:76; amino acid sequence SEQ ID NO:77) which is made up of the Tth DN RX HT 5′ nuclease domain and the Taq DN RX HT polymerase domain.

[0282] 2. Construction of TaqTth(N-B)

[0283] The Taq DN RX HT construct was cut with the enzymes NdeI and BamHI and the larger, vector fragment was gel isolated as detailed above. The Tth DN RX HT construct was also cut with NdeI and BamHI and the smaller (approximately 795 base pairs) Tth fragment was gel isolated and purified. The Tth NdeI-BamHI insert was ligated into the Taq NdeI-BamHI vector as detailed above to generate the TaqTth(N-B) (DNA sequence SEQ ID NO:78; amino acid sequence SEQ ID NO:79).

[0284] 3. Construction of TaqTth(B-S)

[0285] The Taq DN RX HT construct was cut with the enzymes BamHI and SalI and the larger vector fragment was gel isolated as detailed above. The Tth DN RX HT construct was also cut with BamHI and SalI and the smaller (approximately 741 base pairs) Tth fragment was gel isolated and purified. The Tth BamHI-SalI insert was ligated into the Taq BamHI-SalI vector as detailed above to generate the TaqTth(B-S) (DNA sequence SEQ ID NO:80; amino acid sequence SEQ ID NO:81).

[0286] 4. Construction of TaqTth(N-D)

[0287] The Taq DN RX HT construct was cut with the enzymes NotI and NdeI and the larger vector fragment was isolated as detailed above. The Tth DN RX HT construct was also cut with NotI and NdeI and the smaller (approximately 345 base pairs) Tth fragment was gel isolated and purified. The Tth NotI-NdeI insert was ligated into the Taq NotI-NdeI vector as detailed above to generate the TaqTth(N-D) (DNA sequence SEQ ID NO:82; amino acid sequence SEQ ID NO:83).

[0288] 5. Construction of TaqTth(D-B)

[0289] The Taq DN RX HT construct was cut with the enzymes NdeI and BamHI and the larger vector fragment was isolated as detailed above. The Tth DN RX HT construct was also cut with NdeI and BamHI and the smaller (approximately 450 base pairs) Tth fragment was gel isolated and purified. The Tth NdeI-BamHI insert was ligated into the Taq NdeI-BamHI vector as detailed above to generate the TaqTth(D-B) (DNA sequence SEQ ID NO:84; amino acid sequence SEQ ID NO:85).

[0290] 6. Construction of TaqTth(Bs-B)

[0291] The Taq DN RX HT construct was cut with the enzymes BstBI and BamHI and the larger vector fragment was isolated as detailed above. The Tth DN RX HT construct was also cut with BstBI and BamHI and the smaller (approximately 633 base pairs) Tth fragment was gel isolated and purified. The Tth NdeI-BamHI insert was ligated into the Taq NdeI-BamHI vector as detailed above to generate TaqTth(Bs-B) (DNA sequence SEQ ID NO:86; amino acid sequence SEQ ID NO:87).

[0292] 7. Construction of TaqTth(N-Bs)

[0293] The Taq DN RX HT construct was cut with the enzymes NotI and BstBI and the larger vector fragment was isolated as detailed above. The Tth DN RX HT construct was also cut with NotI and BstBI and the smaller (approximately 162 base pairs) Tth fragment was gel isolated and purified. The Tth NotI-BstBI insert was ligated into the Taq NotI-BstBI vector as detailed above to generate TaqTth(N-Bs) (DNA sequence SEQ ID NO:88; amino acid sequence SEQ ID NO:89).

[0294] 8. Construction of TthTaq(B-S)

[0295] The Tth DN RX HT construct was cut with the enzymes BamHI and SalI and the larger vector fragment was isolated as detailed above. The Taq DN RX HT construct was also cut with BamHI and SalI and the smaller (approximately 741 base pairs) Tth fragment was gel isolated and purified. The Taq BamHI-SalI insert was ligated into the Tth BamHI-SalI vector as detailed above to generate the TthTaq(B-S) (DNA sequence SEQ ID NO:90; amino acid sequence SEQ ID NO:91).

[0296] 9. Construction of Tth Taq(N-B)

[0297] The Tth DN RX HT construct was cut with the enzymes NotI and BamHI and the larger vector fragment was isolated as detailed above. The Taq DN RX HT construct was also cut with NotI and BamHI and the smaller (approximately 795 base pairs) Tth fragment was gel isolated and purified. The Taq NotI-BamHI insert was ligated into the Tth NotI-BamHI vector as detailed above to generate the TthTaq(N-B) (DNA sequence SEQ ID NO:92; amino acid sequence SEQ ID NO:93).

[0298] The cleavage activities of these chimerical proteins were characterized as describe in Example 1, part A, and a comparison of the cleavage cycling rates on an RNA target is shown in FIG. 12. As further discussed in the Description of the Invention, these data show that elements found in the central third of the TthPol protein are important in conferring the TthPol-like RNA-dependent cleavage activity on the chimerical proteins comprising portions of TaqPol.

### EXAMPLE 4

[0299] Alterations influencing RNA-dependent 5′ nuclease activity do not necessarily influence RNA-dependent DNA polymerase activity

[0300] TthPol is known to have a more active RNA template dependent DNA polymerase than does the TaqPol (Myers and Gelfand, Biochemistry 30:7661 [1991]). To determine whether the RNA template dependent 5′ nuclease activity of the Thermus DNA Pol I enzymes is related to their RNA-dependent polymerase activity, the D785N and D787N mutations used to create the polymerase-deficient versions of TaqPol and TthPol, respectively were reversed. Polymerase activity was similarly restored to the TaqTth (N) (DNA sequence SEQ ID NO:94; amino acid sequence SEQ ID NO:95), TaqTth(N-B) (DNA sequence SEQ ID NO:96; amino acid sequence SEQ ID NO:97), TaqTth(B-S) (DNA sequence SEQ ID NO:98; amino acid sequence SEQ ID NO:99) chimeras, and the TaqPol(W417L/G418K/ E507Q) (DNA sequence SEQ ID NO:100; amino acid sequence SEQ ID NO:101) mutant proteins.

[0301] Polymerase function was restored in all the above mentioned enzyme mutants by inserting the BamHI to SalI fragment of the native, non-DN sequence into the selected chimera or mutant enzyme. For example, the mutant construct TaqTth(N-B) was cut with the restriction enzyme BamHI (approximate amino acid position 593) and the restriction enzyme SalI (approximate amino acid position 840). The larger vector fragment was gel purified as described in Example 3D. The native TaqPol construct was also cut with the restriction endonucleases BamHI and SalI, and the smaller insert fragment containing the native amino acid sequence was also gel purified. The insert fragment was then ligated into the vector as detailed in Experimental Example 3D.

[0302] The polymerase activities of these proteins were evaluated by extension of the dT₂₅₋₃₅-oligonucleotide primer with fluorescein-labeled dUTP in the presence of either poly(dA) or poly(A) template. Primer extension reactions were carried out in 10 μl buffer containing 10 mM MOPS, pH7.5, 5 mM MgSO₄, 100 mM KCl. Forty ng of enzyme were used to extend 10 μM (dT)₂₅₋₃₀ primer in the presence of either 10 μM poly(A)₂₈₆ or 1 μM poly(dA)₂₇₃ template, 45 μM dTTP and 5 μM F1-dUTP at 60° C. for 30 min. Reactions were stopped with 10 μl of stop solution (95% formamide, 10 mM EDTA, 0.02% methyl violet dye). Samples (3 μl) were fractionated on a 15% denaturing acrylamide gel and the fraction of incorporated F1-dUTP was quantitated using an FMBIO-100 fluorescent gel scanner (Hitachi) equipped with a 505 nm filter as described above.

[0303] As shown in FIG. 16, the DNA-dependent polymerase activities are very similar for all constructs used in this experiment, whereas the RNA-dependent polymerase activities of TthPol, TaqTth(N) and TaqTth(B-S) are at least 6-fold higher than the activities of TaqPol, TaqTth(N-B) and the TaqPol W417L/G418K/E507Q mutant. From the analysis of these results, it can be concluded that the high RNA-dependent DNA polymerase activity of TthPol is determined by the C-terminal half of the polymerase domain (roughly, amino acids 593-830) and that the RNA-dependent 5′ nuclease and polymerase activities are not related to each other, and are controlled by different regions.

### EXAMPLE 5

[0304] Specific point mutants in Taq DN RX HT developed from information from the chimeric studies

[0305] The chimeric studies (Example 3, above) suggest that the part of the TthPol sequence determining its high RNA-dependent 5′ nuclease activity comprises the BstBI-BamHI region located approximately between amino acid 382 and 593. Comparison of the amino acid sequences between the BstBI and BamHI regions of Tth DN RX HT and Taq DN RX HT (SEQ ID NOS:20 and 19, respectively) revealed only 25 differences (FIG. 13). Among these, 12 amino acid changes were conservative while 13 of the differences resulted in a changes in charge. Since the analysis of the chimeric enzymes suggested that the critical mutations are located in both the BstBI-NdeI and the NdeI-BamHI regions of Tth DN RX HT, site specific mutagenesis was used to introduce the Tth DN RX HT specific amino acids into the BstBI-NdeI and NdeI-BamHI regions of the TaqTth(D-B) and the TaqTth(N-D) respectively.

[0306] Six Tth DN RX HT specific substitutions were generated in the BstBI-NdeI region of the TaqTth(D-B) by single or double amino acid mutagenesis. Similarly, 12 Tth DN RX HT specific amino acid changes were introduced at the homologous position of the NdeI-BamHI region of the TaqTth(N-D).

[0307] Plasmid DNA was purified from 200 ml of JM109 overnight culture using QIAGEN Plasmid Maxi Kit (QIAGEN, Chatsworth, Calif.) according to the manufacturer's protocol to obtain enough starting material for all mutagenesis reactions. All site specific mutations were introduced using the Transformer Site Directed mutagenesis Kit (Clontech) according to the manufacturer's protocol; specific sequence information for the mutagenic primers used for each site is provided below. One of two different selection primers, Trans Oligo AlwNI/SpeI or Switch Oligo SpeI/AlwNI (Clontech, Palo Alto, Calif. catalog #6488-1 or catalog #6373-1) was used for all mutagenesis reactions described. The selection oligo used in a given reaction is dependent on the restriction site present in the vector. All mutagenic primers were synthesized by standard synthetic chemistry. Resultant colonies were E. coli strain JM109.

[0308] 1. Construction of TaqTth(D-B) E404H (DNA sequence SEQ ID NO:102; amino acid sequence SEQ ID NO:103)

[0309] Site specific mutagenesis was performed on pTrc99A TaqTth(D-B) DNA using the mutagenic primer 240-60-01 5′-gag gag gcg ggg cac cgg gcc gcc ctt-3′ (SEQ ID NO:104) to introduce the E404H mutation.

[0310] 2. Construction of TaqTth(D-B) F413H/A414R (DNA sequence SEQ ID NO:105; amino acid sequence SEQ ID NO:106)

[0311] Site specific mutagenesis was performed on pTrc99A TaqTth(D-B) DNA using the mutagenic primer 240-60-02 5′-ctt tcc gag agg ctc cat cgg aac ctg tgg ggg agg-3′ (SEQ ID NO:107) to introduce the F413H and the A414R mutations.

[0312] 3. Construction of TaqTth(D-B) W417L/G418K (DNA sequence SEQ ID NO:108; amino acid sequence SEQ ID NO:109)

[0313] Site specific mutagenesis was performed on pTrc99A TaqTth(D-B) DNA using the mutagenic primer 240-60-03 5′-ctc ttc gcc aac ctg ctt aag agg ctt gag ggg gag-3′ (SEQ ID NO: 110) to introduce the W417L and the G418K mutations.

[0314] 4. Construction of TaqTth(D-B) A439R (DNA sequence SEQ ID NO:111; amino acid sequence SEQ ID NO:112)

[0315] Site specific mutagenesis was performed on pTrc99A TaqTth(ND-B) DNA using the mutagenic primer 240-60-04 5′-agg ccc ctt tcc cgg gtc ctg gcc cat-3′ (SEQ ID NO:113) to introduce the A439R mutation.

[0316] 5. Construction of TaqTth(N-D) L451R (DNA sequence SEQ ID NO:114; amino acid sequence SEQ ID NO:115)

[0317] Site specific mutagenesis was performed on pTrc99AtaqTth(N-D) DNA using the mutagenic primer 240-60-05 5′-acg ggg gtg cgc cgg gac gtg gcc tat-3′ (SEQ ID NO:1 16) to introduce the L415 mutation.

[0318] 6. Construction of TaqTth(N-D) R457Q (DNA sequence SEQ ID NO:117; amino acid sequence SEQ ID NO:118)

[0319] Site specific mutagenesis was performed on pTrc99AtaqTth(N-D) DNA using the mutagenic primer 240-60-06 5′-gtg gcc tat ctc cag gcc ttg tcc ctg-3′ (SEQ ID NO:1 19) to introduce the L415Q mutation.

[0320] 7. Construction of TaqTth(N-D) V463L (DNA sequence SEQ ID NO:120; amino acid sequence SEQ ID NO:121)

[0321] Site specific mutagenesis was performed on pTrc99AtaqTth(N-D) DNA using the mutagenic primer 240-60-07 5′-ttg tcc ctg gag ctt gcc gag gag atc-3′ (SEQ ID NO:122) to introduce the V463L mutation.

[0322] 8. Construction of TaqTth(N-D) A468R (DNA sequence SEQ ID NO:123; amino acid sequence SEQ ID NO:124)

[0323] Site specific mutagenesis was performed on pTrc99AtaqTth(N-D) DNA using the mutagenic primer 240-60-08 5′-gcc gag gag atc cgc cgc ctc gag gcc-3′ (SEQ ID NO:125) to introduce the A468R mutation.

[0324] 9. Construction of TaqTth(N-D) A472E (DNA sequence SEQ ID NO:126; amino acid sequence SEQ ID NO:127)

[0325] Site specific mutagenesis was performed on pTrc99AtaqTth(N-D) DNA using the mutagenic primer 240-60-09 5′-gcc cgc ctc gag gag gag gtc ttc cgc-3′ (SEQ ID NO:128) to introduce the A472E mutation.

[0326] 10. Construction of TaqTth(N-D) G499R (DNA sequence SEQ ID NO:129; amino acid sequence SEQ ID NO:130)

[0327] Site specific mutagenesis was performed on pTrc99AtaqTth(N-D) DNA using the mutagenic primer 240-60-10 5′-ttt gac gag cta agg ctt ccc gcc atc-3′ (SEQ ID NO:131) to introduce the G499R mutation.

[0328] 11. Construction of TaqTth(N-D) E507Q (DNA sequence SEQ ID NO:132; amino acid sequence SEQ ID NO:133)

[0329] Site specific mutagenesis was performed on pTrc99AtaqTth(N-D) DNA using the mutagenic primer 276-046-04 5′-atc gcc aag acg caa aag acc ggc aag-3′ (SEQ ID NO: 134) to introduce the E507Q mutation.

[0330] 12. Construction of TaqTth(N-D) Y535H (DNA sequence SEQ ID NO:135; amino acid sequence SEQ ID NO:136)

[0331] Site specific mutagenesis was performed on pTrc99AtaqTth(N-D) DNA using the mutagenic primer 240-60-11 5′-aag atc ctg cag cac cgg gag ctc acc-3′ (SEQ ID NO:137) to introduce the Y535H mutation.

[0332] 13. Construction of TaqTth(N-D) S543N (DNA sequence SEQ ID NO:138; amino acid sequence SEQ ID NO:139)

[0333] Site specific mutagenesis was performed on pTrc99AtaqTth(N-D) DNA using the mutagenic primer 240-60-12 5′-acc aag ctg aag aac acc tac att gac-3′ (SEQ ID NO:140) to introduce the S543N mutation.

[0334] 14. Construction of TaqTth(N-D) I546V (DNA sequence SEQ ID NO:141; amino acid sequence SEQ ID NO:142)

[0335] Site specific mutagenesis was performed on pTrc99AtaqTth(N-D) DNA using the mutagenic primer 240-60-13 5′-aag agc acc tac gtg gac ccc ttg ccg-3′ (SEQ ID NO:143) to introduce the I546V mutation.

[0336] 15. Construction of TaqTth(N-D) D551S/1553V (DNA sequence SEQ ID NO:144; amino acid sequence SEQ ID NO:145)

[0337] Site specific mutagenesis was performed on pTrc99AtaqTth(N-D) DNA using the mutagenic primer 240-60-14 5′-att gac ccc ttg ccg agc ctc gtc cac ccc agg acg ggc-3′ (SEQ ID NO:146) to introduce the D551S and the 1553V mutations.

[0338] 16. Construction of TaqDN RX HT W417L/G418K/E507Q (DNA sequence SEQ ID NO:147; amino acid sequence SEQ ID NO:148)

[0339] The TaqDN RX HT W417L/G418K/E507Q triple mutant was made by combining the TaqTth(D-B)W417L/G418K with the TaqTth(N-D) E507Q. TaqTth(D-B)W417L/G418K was cut with the restriction enzymes NdeI and BamHI, and the larger, vector fragment was isolated as detailed in Example 3. The TaqTth(N-D) E507Q construct was also cut with NdeI and BamHI and the smaller (approximately 795 base pairs) fragment was gel isolated and purified as detailed in Example 3. The NdeI-BamHI insert was ligated into the gel purified vector, as detailed in Example 3.

[0340] 17. Construction of TaqDN RX HT W417L/E507Q (DNA sequence SEQ ID NO:149; amino acid sequence SEQ ID NO:150)

[0341] Starting with TaqDN RX HT W417L/G418K/E507Q described above, mutagenic primer 337-01-02: 5′-TTC GCC AAC CTG CTT GGG AGG CTT GAG GGG GAG -3′ (SEQ ID NO:151) was used in a site specific mutagenesis reaction to change the K at amino acid position 418 back to the wild-type amino acid, G. Site specific mutagenesis was done using the Transformer Site Directed Mutagenesis Kit (Clonetech) according to the manufacturer's instructions, and as described in Experimental Example 4.

[0342] 18. Construction of TaqDN RX HT G418K/E507Q (DNA sequence SEQ ID NO:152; amino acid sequence SEQ ID NO:153)

[0343] Starting with TaqDN RX HT W417L/G418K/E507Q described above, mutagenic primer 337-01-01: 5′-CTC TTC GCC AAC CTG TGG AAG AGG CTT GAG GGG -3′ was used in a site specific mutagenesis reaction to change the L at amino acid position 417 back to the wild-type amino acid, W. Site specific mutagenesis was done using the Transformer Site Directed Mutagenesis Kit (Clonetech) according to the manufacturer's instructions, and as described in Experimental Example 4.

[0344] Expression and purification of mutant proteins was done as detailed in Example 3, and the cleavage activities of these proteins were characterized as describe in Example 1, part A. A comparison of the cleavage cycling rates of a selection of these mutant proteins on an RNA target is shown in FIG. 14. As further discussed in the Description of the Invention, these data show that amino acids in the regions 417/418 and amino acid 507 are important in the conferring the TthPol-like RNA-dependent cleavage activity on the chimerical proteins comprising portions of TaqPol in combination with portions of TthPol that are not independently capable of providing enhanced RNA dependent activity (i.e., the D-B and N-D portions of Tth). As described in the Description of the Invention, Taq DN RX HT variant carrying only the W417L, G418K and E507Q substitutions were created. By comparing their cleavage rates to that of Tth DN RX HT on the IL-6 RNA substrate as described in Example 1, these mutations were determined to be sufficient to increase the Taq DN RX HT activity to the Tth DN RX HT level. FIG. 15 shows that the Taq DN RX HT W417L/G418K/E507Q and Taq DN RX HT G418K/E507Q mutants have 1.4 times higher activity than Tth DN RX HT and more than 4 fold higher activity than Taq DN RX HT, whereas the Taq DN RX HT W417L/E507Q mutant has the same activity as the enzyme, which is about 3 fold higher than Taq DN RX HT. These results demonstrate that K418 and Q507 of TthPol are particularly important amino acids in providing RNA dependent 5′ nuclease activity that is enhanced compared to TaqPol.

### EXAMPLE 6

[0345] RNA-dependent 5′ nuclease properties of the Taq DN RX HT G418K/E507Q 5′ nuclease are similar to Tth DN RX HT with respect to salt and temperature optima determine if the G418K/E507Q mutations caused any significant changes in the properties of the Taq DN RX HT mutant in addition to the increased cleavage rate with the RNA target, the Taq DN RX HT G418K/E507Q (SEQ ID NO:153), Taq DN RX HT (SEQ ID NO:73), and Tth DN RX HT (SEQ ID NO:72) enzymes were compared in the RNA template dependent 5′ nuclease assay under conditions where temperature and the concentrations of salt and divalent ions were varied. The upstream DNA and the template RNA strands of the substrate used in this study were linked into a single IrT molecule (SEQ ID NO:27) as shown in FIG. 20A, and the labeled downstream probe (SEQ ID NO:26) was present in large excess. The 5′ end of the target RNA strand was blocked with a biotin-streptavidin complex to prevent any non-specific degradation by the enzyme during the reaction (Lyamichev et al., Science 260:778 [1993], Johnson et al., Science 269:238 [1995]). The cleavage rates for Taq DN RX HT G418K/E507Q, Taq DN RX HT, and Tth DN RX HT are plotted as functions of temperature in FIG. 20B. The closed circles represent enzyme Taq DN RX HT, the open circles represent enzyme Tth DN RX HT, and the Xs represent enzyme Taq DN RX HT G418K/E507Q. The difference in the activities of Tth and Taq DN RX HT enzymes with the IrT substrate is even greater than the difference found with the IL-6 RNA substrate when tested in a cleavage assay as described in Example 1. The G418K/E507Q mutations increase the activity of the Taq enzyme more than tenfold and by 25% compared with the Tth enzyme. All three enzymes show a typical temperature profile of the invasive signal amplification reaction and have the same optimal temperature. No significant effect of G418K/E507Q mutations on DNA dependent 5′ nuclease activity of Taq DN RX HT with the all-DNA substrate analogous to IrT (SEQ ID NO:28) under the same conditions was found.

[0346] The effects of KCl and MgSO₄ concentrations on the 5′ nuclease activity of Taq DN RX HT G418K/E507Q, Taq DN RX HT, and Tth DN RX HT with the IrT substrate are shown in FIG. 20C and D. The activities of all enzymes have similar salt dependencies with an optimal KCl concentration of 100 mM for Taq DN RX HT G418K/E507Q and Tth DN RX HT and 50 mM for Taq DN RX HT. The optimal MgSO₄ concentration for all enzymes is approximately 8 mM. The analysis of the data presented in FIG. 20 suggests that the properties of Taq DN RX HT G418K/E507Q are much closer to those of Tth DN RX HT rather than Taq DN RX HT confirming the key role of the G418K/E507Q mutations in the recognition of the substrate with an RNA target.

[0347] To understand the mechanism of the reduction of the 5′ nuclease activity in the presence of an RNA versus a DNA target, the Michaelis constant (Kₘ) and the maximal catalytic rate (k_{cat}) of all three enzymes were determined, using an excess of the IrT substrate (SEQ ID NO:27) and the downstream probe (SEQ ID NO:26) and a limiting enzyme concentration. For these measurements, ten-μl reactions were assembled containing 10 mM MOPS, pH 7.5, 0.05% Tween 20, 0.05% Nonidet P-40, 10 μg/ml tRNA, 4 mM MgCl₂, 1 nM of enzyme (Taq DN RX HT, Tth DN RX HT, or Taq DN RX HT G418K/E507Q) and different concentrations (0.125, 0.25, 0.5 or 1 μM) of an equimolar mixture of the IrT target and the downstream probe. The cleavage kinetics for each enzyme and each substrate concentration were measured at 46° C. Reactions were stopped by the addition of 10 μl of 95% formamide containing 10 mM EDTA and 0.02% methyl violet (Sigma). One μl of each stopped reaction digest was fractionated on a 20% denaturing acrylamide gel (19:1 cross-linked), with 7M urea, and in a buffer of 45 mM Tris-borate, pH 8.3, 1.4mM EDTA. Gels were scanned on an FMBIO-100 fluorescent gel scanner (Hitachi) using a 585 nm filter. The fraction of cleaved product (determined from intensities of bands corresponding to uncut and cut substrate with FMBIO Analysis software, version 6.0, Hitachi) was plotted as a function of reaction time. The initial cleavage rates were determined from the slopes of linear part of the cleavage kinetics and were defined as the concentration of cut product divided by the enzyme concentration and the time of the reaction (in minutes). The Michaelis constant Kₘ and the maximal catalytic rate k_{cat} of each enzyme with IrT substrate were determined from the plots of the initial cleavage rate as functions of the substrate concentration.

[0348] It was found that all three enzymes have similar Kₘ values (in the range of 200-300 nM) and k_{cat} values of approximately 4 min⁻¹ for Taq DN RX HT and Tth DN RX HT and of 9 min⁻¹ for Taq DN RX HT G418K/E507Q. That the G418K/E507Q mutations increase the k_{cat} of Taq DN RX HT more than two fold, but have little effect on Kₘ suggest that the mutations position the substrate in an orientation more appropriate for cleavage, rather than simply increase the binding constant.

### EXAMPLE 7

[0349] Use of molecular modeling to further improve RNA-dependent 5′ nuclease activity

[0350] A. Point mutants

[0351] To develop enzymes with altered function, sequence changes were introduced by site specific mutagenesis in predetermined locations or by random mutagenesis. Locations for site specific mutagenesis were chosen based on evidence from chimeric studies, relevant published literature, and molecular modeling. Seven additional mutant enzymes were developed from the Tth DN RX HT enzyme, and twenty additional mutant enzymes were developed from the Taq DN RX HT enzyme, both discussed previously. Some of the mutant enzymes are the result of multiple mutagenesis reactions, that is, more than one change has been introduced to obtain the final product. Mutation reactions were done using the Tth DN RX HT construct (SEQ ID NO:70) described in Example 2C2, or the Taq DN RX HT construct (SEQ ID NO:71), described in Example 2C1 unless otherwise stated. Plasmid DNA was purified from 200 ml of JM109 overnight culture using QIAGEN Plasmid Maxi Kit (QIAGEN, Chatsworth, Calif.) according to the manufacturer's protocol to obtain enough starting material for all mutagenesis reactions. All site specific mutations were introduced using the Transformer Site Directed mutagenesis Kit (Clontech) according to the manufacturer's protocol. One of two different selection primers, Trans Oligo AlwNI/SpeI or Switch Oligo SpeI/AlwNI (Clontech, Palo Alto Calif. catalog #6488-1 or catalog #6373-1) was used for all mutagenesis reactions described. The selection oligo used in a given reaction is dependent on the restriction site present in the vector. All mutagenic primers for both the site specific mutagenesis and the random mutagenesis were synthesized by standard synthetic chemistry. Resultant colonies for both types of reactions were E. coli strain JM109. Random mutagenesis methods are described below.

[0352] Mutants were tested via the rapid screening protocol detailed in Example 1. Then, if more detailed analysis was desired, or if a larger protein preparation was required, expression and purification of mutant proteins was done as detailed in Example 3.

[0353] 1. Construction of Tth DN RX HT H641A, Tth DN RX HT H748A, Tth DN RX HT H786A

[0354] Site specific mutagenesis was performed on pTrc99A Tth DN RX HT DNA using the mutagenic primer 583-001-02: 5′-gct tgc ggt ctg ggt ggc gat gtc ctt ccc ctc-3′ (SEQ ID NO:158) to introduce the H641A mutation (DNA sequence SEQ ID NO:156; amino acid sequence SEQ ID NO:157), or the mutagenic primer 583-001-03: 5′ cat gtt gaa ggc cat ggc ctc cgc ggc ctc cct-3′ (SEQ ID NO:161) to generate the H748A mutant (DNA sequence SEQ ID NO:159; amino acid sequence SEQ ID NO:160), or the mutagenic primer 583-001-04: 5′-cag gag gag ctc gtt ggc gac ctg gag gag-3′ (SEQ ID NO:164) to generate the H786A mutant enzyme (DNA sequence SEQ ID NO:162; amino acid sequence SEQ ID NO:163).

[0355] 2. Construction of Tth DN RX HT (H786A/G506K/Q509K)

[0356] Starting with the mutant Tth DN RX HT H786A, generated above, site specific mutagenesis was done using the mutagenic primer 604-022-02: 5′-gga gcg ctt gcc tgt ctt ctt cgt ctt ctt caa ggc ggg agg cct-3′ (SEQ ID NO:167) to generate this variant termed “TthAKK”, (DNA sequence SEQ ID NO:165; amino acid sequence SEQ ID NO:166).

[0357] 3. Construction of Taq DN RX HT (W417L/G418K/E507Q/H784A)

[0358] Mutagenic oligonucleotide 158-029-02: 5′-gag gae cag ctc gtt ggc gac ctg aag gag cat-3′ (SEQ ID NO:170) was used in a site specific mutagenesis reaction to introduce the H784A mutation and generate this construct termed “Taq4M” (DNA sequence SEQ ID NO:168; amino acid sequence SEQ ID NO:169).

[0359] 4. Construction of Taq4M H639A, Taq4M R587A, Taq4M G504K and Taq4M G80E

[0360] Site specific mutagenesis was done on the Taq4M mutant, using primer 473-010-11: 5′-gaggggcgggacatcgccacggagaccgccagc-3′ (SEQ ID NO:173) to generate the Taq 4M H639A mutant (DNA sequence SEQ ID NO:171; amino acid sequence SEQ ID NO:172), primer 473-010-10: 5′-cag aac atc ccc gtc gcc ace ccg ctt ggg cag-3′ (SEQ ID NO:176) to generate Taq 4M R587A (DNA sequence SEQ ID NO:174; amino acid sequence SEQ ID NO:175), primer 300-081-06: 5′-ggg ctt ccc gcc atc aag aag acg gag aag acc-3′ (SEQ ID NO:179) to generate Taq 4M G504K (DNA sequence SEQ ID NO:177; amino acid sequence SEQ ID NO:178), and primer 330-088-04: 5′-cta ggg ctt ccc gcc atc aag aag aeg caa aag acc ggc-3′ (SEQ ID NO:182) to generate the Taq 4M G80E mutant (DNA sequence SEQ ID NO:180; amino acid sequence SEQ ID NO:181).

[0361] 5. Construction of Taq 4M P88E/P90E and Taq 4M L109F/A110T

[0362] Starting with Taq 4M described above, site specific mutagenesis was done using primer 473-087-03: 5′-ccg ggg aaa gtc ctc ctc cgt ctc ggc ccg gcc cgc ctt-3′ (SEQ ID NO:185) to generate the P88E/P90E mutations (DNA sequence SEQ ID NO:183; amino acid sequence SEQ ID NO:184), or primer 473-087-05: 5′-cgg gac ctc gag gcg cgt gaa ccc cag gag gtc cac-3′ (SEQ ID NO:188) to generate the L109F/A110T mutations (DNA sequence SEQ ID NO:186; amino acid sequence SEQ ID NO:187).

[0363] 6. Construction of Taq DN RX HT (W417L/G418K/G499R/A502K/1503L /G504K/ E507K/H784A)

[0364] Two PCR reactions were performed, first using construct Taq4M (Taq W417L/G418K/G504K/E507Q/H784A) as a template. Using primers 158-84-01

| | |
|---|---|
| 158-84-01 | |
| 5′-CTCCTCCACGAGTTCGGC-3′ | (SEQ ID NO:191) and |
| 535-33-02 | |
| 5′-ACC GGT CTT CTT CGT CTT CTT CAA CTT GGG AAG CCT GAG CTC GTC AAA-3′ | (SEQ ID NO:192) |

[0365] a 620 base pair PCR fragment was generated. Another 510 base pair PCR product was generated using primer

| | |
|---|---|
| 535-33-01 | |
| 5′-AAG ACG AAG AAG ACC GGT AAG CGC TCC ACC AGC-3′ and | (SEQ ID NO:193) |
| 330-06-03 | |
| 5′-GTC GAC TCT AGA TCA GTG GTG GTG GTG GTG GTG CTT GGC CGC CCG GCG CAT C-3′. | (SEQ ID NO:194) |

[0366] The two PCR products overlap such that a final recombinant PCR amplification was done using the outside primers 158-84-01 and 330-06-03 to yield the 1182 base pair product. The recombinant PCR product was digested with the restriction enzymes NotI and BamHI according to the manufacturer's instructions to yield a 793 base pair fragment. The parent plasmid Taq4M was also digested with the same enzymes and used as the vector for ligation. All DNA fragments were TAE agarose gel purified prior to ligation. The fragment was ligated into the vector, and transformed into JM109 cells, thus incorporating the mutations G499R, A502K, 1503L, and E507K as well as the restriction endonuclease site, Agel. This construct is termed “Taq 8M” (DNA sequence SEQ ID NO:189; amino acid sequence SEQ ID NO: 190).

[0367] B. Random Mutagenesis

[0368] Numerous enzymes with altered function were generated via random mutagenesis. The regions of the protein targeted for random mutagenesis were chosen based on molecular modeling data and from information in the literature. Different mutagenic primers were used to introduce mutations into different regions of the protein. Random mutagenesis was performed on the Taq variant Taq 4M G504K (Taq DN RX HT W417L/G418K/G504K/E507Q/H784A/) (SEQ ID NO:177) described above and mutant PCR fragments generated in the mutagenesis reaction were exchanged for homologous regions in Taq8M (SEQ ID NO:189) unless otherwise stated.

[0369] Random mutagenesis was also performed on the Tth DN RX HT H786A (SEQ ID NO:162) described above. Mutant PCR fragments generated with the Tth DN RX HT H786A template were exchanged for homologous regions in the unaltered Tth DN RX HT H786A.

[0370] 1. Random mutants in amino acid residues 500-507 or 513-520

[0371] The first mutagenic oligonucleotide, 535-054-01: 5′-gga gcg ctt acc ggt ctt (ttg cgt ctt ctt gat ctt ggg aag) cct tag ctc gtc aaa gag-3′ (SEQ ID NO:195) was used in conjunction with 158-84-01: 5′-CTC CTC CAC GAG TTC GGC-3′ (SEQ ID NO:196) to install random residues from amino acid position 500 to 507 of Taq polymerase variant Taq DN RX HT W417L/G418K/G504K/E507Q/H784A (SEQ ID NO:177). This was accomplished by synthesizing the primer 535-054-01 such that only 91% of the bases within the parenthesis are unaltered while the remaining 9% of the bases are an equal mixture of the other 3 nucleotides. The initial, unaltered sequence of this oligo includes the G499R, A502K and the Q507K changes.

[0372] To generate mutations in the region 500-507, primer 535-054-01 and primer 158-84-01 were used in a PCR reaction, using the Advantage cDNA PCR kit (Clonetech) and Taq variant described above, as the target. This PCR fragments was then run on a 1% TAE agarose gel, excised and purified with QIAquick Gel Extraction Kit (Qiagen, Valencia Calif., catalog #28706). The purified fragment was cut with NotI and AgeI and ligated into pTaq8M that had been linearized with NotI and AgeI. JM109 E. coli cells (Promega) were transformed with the ligated products. Clones were tested as described below.

[0373] The second mutagenic oligonucleotide (used in a separate reaction)

The second mutagenic oligonucleotide (used in a seperate reaction)

| | |
|---|---|
| 535-054-02: | |
| 5′-caa | (SEQ ID NO:197) |
| aag acc ggt aag cgc (tcc acc agc gcc gcc gtc ctg gag) gcc ctc cgc gag gcc cac-3′ | |
| was used in conjunction with | |
| 330-06-03: | |
| 5′-GTC GAC TCT AGA TCA GTG GTG GTG | (SEQ ID NO:198) |
| GTG GTG GTG CTT GGC CGC CCG GCG CAT C-3′ | |

[0374] to install random residues from amino acid 513-520. The bases within the parenthesis of primer 535-054-02 are also 91% wild-type and 3% each of the other 3 nucleotides.

[0375] To generate mutations in the region 513-520, primer 535-054-02 and primer 535-054-02 were used in a PCR reaction with Taq DN RX HT W417L/G418K/G504K/ E507Q/H784A (SEQ ID NO:177) as template, as described above. The resulting PCR fragment was purified as above and cut with the restriction enzymes Agel and BamHI. The cut fragment was then ligated into the Taq8M construct, also linearized with Agel and BamHI. JM109 E. coli cells were transformed with the ligated products. Clones were tested as described Example 1. Mutants developed from these include:

Taq DN RX HT W417L/G418K/G499R/A502K/K504N/E507K/H784A (M1-13)
(DNA sequence SEQ ID NO:199; amino acid sequence SEQ ID NO:200).
Taq DN RX HT W417L/G418K/G499R/L500I/A502K/G504K/Q507H/H784A (M1-36)
(DNA sequence SEQ ID NO:201; amino acid sequence SEQ ID NO:202).
Taq DN RX HT W417L/G418K/G499R/A502K/I503L/G504K/E507K/T514S/H784A (M2-24)
(DNA sequence SEQ ID NO:203; amino acid sequence SEQ ID NO:204).
Taq DN RX HT W417L/G418K/G499R/A502K/I503L/G5O4K/E5O7K/V518L/H784A (M2-06)
(DNA sequence SEQ ID NO:205; amino acid sequence SEQ ID NO:206).

[0376] 2. TthDN RX HT H786A random mutagenesis

[0377] To generate mutants in the helix-hairpin-helix region of the TthDN RX HT H786A (SEQ ID NO:163) enzyme, two different PCR reactions were performed using the H786A (SEQ ID NO:162) mutant as a template. The two PCR products overlap such that a recombinant PCR reaction can be performed (Higuchi, in PCR Technology, H. A. Erlich, ed., Stockton Press, New York. pp6l-70 [1989]). This final PCR product is then exchanged with the homologous region of the TthDN H786A mutant by using restriction enzyme sites located on the ends of the fragment and within the TthDN H786A sequence.

[0378] Starting with TthDN H786A discussed above, and using primer 604-08-06: 5′-gtc gga ggg gtc ccc cac gag-3′ (SEQ ID NO:207) and primer 390-76-08: 5′-tgt gga att gtg agc gg (SEQ ID NO:208), a 620 base pair PCR fragment was generated. PCR reactions were performed using the Advantage cDNA PCR kit (Clontech) according to manufacturer's instructions. This PCR product includes amino acids 1-194. No mutations were introduced via this reaction, however the restriction enzyme site EcoRI is present at the 5′ end.

[0379] Starting with TthDN RX HT H786A discussed above, and using mutagenic primer 604-08-05: 5′-ctc gtg ggg gac ccc tcc gac aac ctc (ccc ggg gtc aag ggc atc ggg gag aag acc gcc)ctc aag ctt ctc aag-3′ (SEQ ID NO:209) and primer 209-74-02: 5′-gtg gcc tcc ata tgg gcc agg ac-3′ (SEQ ID NO:210) a 787 base pair PCR fragment was generated. PCR reactions were done as above. This fragment does contain random mutations, due to the presence of the mutagenic primer, 604-08-05. The bases within the parenthesis of this primer were synthesized such that 91% of the sequence is wild-type, while the additional 9% is evenly divided between the remaining 3 bases.

[0380] The two PCR fragments overlap, and were combined in a recombinant PCR reaction. Primers 390-76-08 and 209-74-02 were added, and the Advantage cDNA PCR kit (Clontech) was again used according to manufacturer's instructions. A 1380 base pair product was generated from this reaction.

[0381] The recombinant PCR product was cut with the restriction enzymes EcoRI and NotI according to the manufacturer's instructions to yield a 986 base pair fragment. TthDN RX HT H786A was prepared by cutting with the same enzymes. The fragment was then ligated into the vector, and transformed into JM109 cells. New mutants developed from this set of reactions include:

| | |
|---|---|
| TthDN RX HT H786A/P197R/K200R. | (DNA sequence SEQ ID NO:211; amino acid sequence SEQ ID NO:212) |
| TthDN RX HT H786A/K205Y. | (DNA sequence SEQ ID NO:213; amino acid sequence SEQ ID NO:214) |
| TthDN RX HT H786A/G203R. | (DNA sequence SEQ ID NO:215; amino acid sequence SEQ ID NO:216) |

[0382] 3. Construction of Taq DN RX HT W417L/G418K/H784A L109F/A110T/G499R/A502K/I503L/G504K/E507K/T514S (Taq SS)

[0383] Starting with Taq DN RX HT W417L/G418K/G499R/A502K/I503L/G504K/E507K/T514S/H784A (SEQ ID NO:203) mutant described above, primer 473-087-05: 5′-cgg gac ctc gag gcg cgt gaa ccc cag gag gtc cac-3′ (SEQ ID NO:219) was used in conjunction with the appropriate selection primer in a site specific mutagenesis reaction to incorporate the L1 09F and A110T mutations to generate this enzyme, termed “TaqSS” (DNA sequence SEQ ID NO:217; amino acid sequence SEQ ID NO:218).

[0384] 4. Construction of Taq DN RX HT W417L/G418L/H784A P88E/P90E/G499R/A502K/1503L/G504K/E507K/T514S

[0385] Starting with Taq DN RX HT W417L/G418K/G499R/A502K/I503L/G504K/E507K/T514S/H784A (SEQ ID NO:203) mutant described above, primer 473-087-03: 5′-ccg ggg aaa gtc ctc ctc cgt ctc ggc ccg gcc cgc ctt-3′ (SEQ ID NO:222) was used in conjunction with the appropriate selection primer in a site specific mutagenesis reaction to incorporate the P88E and P90E mutations to generate this enzyme (DNA sequence SEQ ID NO:220; amino acid sequence SEQ ID NO:221).

[0386] 5. TaqSS random mutagenesis

[0387] Random mutagenesis was used to introduce additional changes in the helix-hairpin-helix domain of the TaqSS mutant (SEQ ID NO:217). The mutagenesis was done as described in example 9 above. In the first step, two different but overlapping PCR products were generated. One of the PCR products, generated with oligos 390-76-08 (SEQ ID NO:208), and 604-08-04: 5′-gtc gga ctc gtc acc ggt cag ggc-3′ (SEQ ID NO:223) incorporates the EcoRI site into the fragment, but does not incorporate any mutations. The second PCR product utilizes mutagenic primer 604-08-03: 5′-ctg acc ggt gac gag tcc gac aac ctt (ccc ggg gtc aag ggc atc ggg gag aag acg gcg) agg aag ctt ctg gag-3′ (SEQ ID NO:224) and primer 209-74-02 (SEQ ID NO:210). This fragment contains random point mutations, and when combined via recombinant PCR with the first fragment, can be cut with the restriction enzymes EcoRI and NotI, and ligated into the TaqSS construct, also cut with EcoRI and NotI. The ligated construct was then transformed into JM109. Colonies were screened as described below. Enzymes developed from this mutagenesis include:

TaqSS K198N
(DNA sequence SEQ ID NO:225; amino acid sequence SEQ ID NO:226).
TaqSS A205Q
(DNA sequence SEQ ID NO:227; amino acid sequence SEQ ID NO:228).
TaqSS I200M/A205G
(DNA sequence SEQ ID NO:229; amino acid sequence SEQ ID NO:230).
TaqSS K203N
(DNA sequence SEQ ID NO:231; amino acid sequence SEQ ID NO:232).
TaqSS T204P
(DNA sequence SEQ ID NO:233; amino acid sequence SEQ ID NO:234).

[0388] 6. Construction of TaqSS R677A

[0389] To generate enzymes with sequence changes in both the arch region and in the polymerase region, additional specific point mutations were generated in TaqSS. Site specific mutagenesis was performed as described above using the oligo 473-060-10: 5′-tag ctc ctg gga gag ggc gtg ggc cga cat gcc-3′ (SEQ ID NO:237) to generate the TaqSS R677A mutant (DNA sequence SEQ ID NO:235; amino acid sequence SEQ ID NO:236).

[0390] 7. Construction of TaqTthAKK (DNA sequence SEQ ID NO:238; amino acid sequence SEQ ID NO:239) and TthTaq5M (DNA sequence SEQ ID NO:240; amino acid sequence SEQ ID NO:241)

[0391] Chimeric mutant TaqTthAKK and TthTaq5M were generated by cutting Tth DN RX HT (H786A/G506K/Q509K) (SEQ ID NO:165; here abbreviated TthAKK) or Taq 4M G504 (SEQ ID NO:177; here abbreviated Taq 5M) with the restriction endonucleases EcoRI and NotI. The smaller insert fragments as well as the larger vector fragments were gel purified as detailed in Example 3D, and the insert fragments were exchanged between the two mutants and ligated as described in Example 3D. Screening and verification of the construct sequence was also done as in Example 3D.

### EXAMPLE 8

[0392] Improvement of RNA-dependent 5′ nuclease activity in other polymerases

[0393] Information gained from the TaqPol/TthPol recombinations, mutagenesis and modeling, was used to make comparable mutations in additional DNA polymerases and examined the effects on the cleavage activities of these enzymes. The DNA polymerases of Thermus filiformus (TfiPol) and Thermus scotoductus (TscPol) were cloned and purified as described in Example 2. The mutagenesis of these two proteins is described below.

[0394] A. Construction of TfiPolDN2M

[0395] Mutagenesis of pTrc99a-TfiPol (SEQ ID NO:48) was done using the QuikChange site-directed mutagenesis kit (Stratagene) according to the manufacturer's protocol. The P420K mutation was made with the following two oligonucleotides;

(SEQ ID NO:244)

5′-CTTCCAGAACCTCTTTAAACGGCTTTCCGAGAAG and

(SEQ ID NO:245)

5′-CTTCTCGGAAAGCCGTTTAAAGAGGTTCTGGAAG.

[0396] The E507Q mutation was made with the following two oligonucleotides;

(SEQ ID NO:246)

5′-CCGGTGGGCCGGACGCAGAAGACGGGCAAGC and

(SEQ ID NO:247)

5′-GCTTGCCCGTCTTCTGCGTCCGGCCCACCGG.

[0397] The D785N mutation was made with the following two oligonucleotides;

(SEQ ID NO:248)

5′-CTCCTCCAAGTGCACAACGAGCTGGTCCTGG and

(SEQ ID NO:249)

5′-CCAGGACCAGCTCGTTGTGCACTTGGAGGAG.
The plasmid containing all three mutations
is called pTrc99a-TfiPolDN2M, (DNA sequence
SEQ ID NO:242; amino acid sequence SEQ ID
NO:243).

[0398] The plasmid containing all three mutations is called pTrc99a-TfiPolDN2M, (DNA sequence SEQ ID NO:242; amino acid sequence SEQ ID NO:243).

[0399] B. Construction of TscPoIDN2M

[0400] Mutagenesis of pTrc99a-TscPol (SEQ ID NO:51) was done with the QuikChange site-directed mutagenesis kit (Stratagene) according to the manufacturer's protocol. The E416K mutation was made with the following two oligonucleotides;

| | |
|---|---|
| 5′-GCCGCCCTCCTGAAGCGGCTTAAGGG and | (SEQ ID NO:252) |
| 5′-CCCTTAAGCCGCTTCAGGAGGGCGGC. | (SEQ ID NO:253) |

[0401] The E505Q mutation was made with the following two oligonucleotides;

| | |
|---|---|
| 5′-ATCGGCAAGACGCAGAAGACGGGCAAGC | (SEQ ID NO:254) |
| and | |
| 5′-GCTTGCCCGTCTTCTGCGTCTTGCCGAT. | (SEQ ID NO:255) |

[0402] The D783N mutation was made with the following two oligonucleotides;

| | |
|---|---|
| 5′-TTGCAGGTGCACAACGAACTGGTCCTC and | (SEQ ID NO:256) |
| 5′-GAGGACCAGTTCGTTGTGCACCTGCAA. | (SEQ ID NO:257) |

[0403] The plasmid containing all three mutations is called pTrc99a-TscPolDN2M, (DNA sequence SEQ ID NO:250; amino acid sequence SEQ ID NO:251).

[0404] C. Chimerics of Tsc, Tfi, Tth and Taq mutants

[0405] 1. Construction of TfiTth AKK (DNA sequence SEQ ID NO:258; amino acid sequence SEQ ID NO:259), TscTthAKK (DNA sequence SEQ ID NO:260; amino acid sequence SEQ ID NO:261), TflTaq5M (DNA sequence SEQ ID NO:262; amino acid sequence SEQ ID NO:263) and TscTaq5M (DNA sequence SEQ ID NO:264; amino acid sequence SEQ ID NO:265)

[0406] To generate chimeric enzymes between Tth DN RX HT (H86A/G506K/Q509K) (here abbreviated TthAKK, SEQ ID NO:165) or Taq 4M G504 (here abbreviated Taq 5M, SEQ ID NO:177), and Tfi DN 2M (SEQ ID NO:242), or Tsc DN 2M (SEQ ID NO:250), additional restriction endonuclease sites were introduced by site specific mutagenesis into the named Tfi and Tsc mutants. Mutagenic primers 700-011-01 5+L′-cag acc atg aat tcc acc cca ctt ttt gac ctg gag-3′ (SEQ ID NO:275) and 700-011-02 5′-gtg gac gcg gcc gcc cga ggc cgc cgc cag ggc cag-3′ (SEQ ID NO:276) were used to introduce an EcoRI site at amino acid position 1 and a NotI site at amino acid position 331 in Tfi DN 2M. Mutagenic primers 700-011-03 5′-cag acc atg aat tcc ctg ccc ctc ttt gag ccc aag-3′ (SEQ ID NO:277) and 700-011-04 5′-gta aac cgc gcc gcc cca ggc ggc ggc caa ggc gtt-3′ (SEQ ID NO:278) were used to introduce an EcoRI site at amino acid position 1 and a NotI site at amino acid position 327 in Tsc DN 2M. PCR reactions were done using the Advance cDNA PCR kit (Clonetech) according to manufacturer's instructions and either Tfi DN 2M or Tsc DN 2M as target, with their corresponding primers. The 1017 base pair PCR products were cut with both EcoRI and NotI to yield 993 base pair insert fragments that were gel purified as described in Example 3D. The mutants Taq4M G504K (SEQ ID NO:177) and Tth DN RX HT (H786A/G506K/Q509K) (SEQ ID NO: 165) were also cut with EcoRI and NotI, and the larger, vector fragment was gel isolated as above. Ligations were performed as detailed in Example 3D, as was the screening and verification of the new constructs.

TABLE 1

| | | Km (dNTP) | | Relative DNA | | |
|---|---|---|---|---|---|---|
| Klenow | Kcat (s⁻¹) | (μM) | Kd (nM) | affinity | Reference | Taq pol |
| Wild-Type | 2.4 | 2.8 | 8 | 1 | 2 | Wild-Type |
| S610A | n. d. | — | n. d. | — | 5 | S515 |
| R668A | 0.006 | 6.5 | 140, 150 | 0.06, 0.05 | 1, 2 | R573* |
| N678A | n. d. | — | n. d. | — | 5 | N583 |
| E710A | 0.1 | 15 | 250 | 0.03 | 2 | E615* |
| E710D | 1.7 | 7.7 | 110 | 0.07 | 2 | E615* |
| K758A | 0.131 | 15.6 | — | 0.63 | 4 | K663 |
| K758R | 2.0 | 2.1 | — | 1.125 | 4 | K663 |
| Y766S | 0.8 | 6.4 | 13 | 0.4, 0.6 | 1, 2 | Y671 |
| R841A | 0.3 | 9.8 | 40, 53 | 0.2 | 1, 2 | R746* |
| N845A | 1.0 | 23 | 8, 5 | 1.0, 1.7 | 1, 2 | N750* |
| N845Q | 0.03 | 1.7 | 80, 55 | 0.1, 0.2 | 1, 2 | N750* |
| Q849A | 0.02 | 3.8 | 100, 160 | 0.08, 0.05 | 1, 2 | Q754 |
| Q849E | 0.001 | n. d. | 90, 91 | 0.09 | 1, 2 | Q754 |
| H881A | 0.3 | 3.3 | 20, 28 | 0.4, 0.3 | 1, 2 | H784* |
| D882N | <0.0001 | n. d. | 30 | 0.6 | 2 | D785 |
| D882S | 0.001 | 7.5 | 0.9 | 9 | 2 | D785 |

References:
1. JBC (1990) 265: 14579-14591
2. JBC (1992) 267: 8417-8428
3. Eur. J. Biochem (1993) 214: 59-65
4. JBC (1994) 269: 13259-13265
5. Nature (1996) 382: 278-281

[0407] TABLE 2
Rational mutations in the polymerase region
A. DNA activity table

| | IdT | % Tth | % Taq4M | HP | X |
|---|---|---|---|---|---|
| Tth DN RX HT | 31.91 | 100% | 83% | 3.81 | 101.9 |
| Tth DN RX HT | 23.61 | 74% | 62% | 5.32 | 221.24 |
| H641A | | | | | |
| Tth DN RX HT | 22.1 | 69% | 58% | 4.39 | 88.17 |
| R748A | | | | | |
| Tth DN RX HT | 34.31 | 108% | 90% | 7.75 | 185.35 |
| H786A | | | | | |
| Tth DN RX HT | 32.1 | 101% | 84% | 5.7 | 332.8 |
| H786A/G506K/ | | | | | |
| Taq DN RX HT | 38.23 | 120% | 100% | 68.21 | 1100.18 |
| W417L/G418K/ | | | | | |
| E507Q/H784A | | | | | |
| (Taq 4M) | | | | | |
| Tag 4M G504K | 36.04 | 113% | 94% | 31.76 | 417.40 |
| Tag 4M H639A | 42.95 | 135% | 112% | 91.46 | 2249.67 |
| Tag 4M R587A | 44.78 | 140% | 117% | 143.0 | 252.69 |
| TaqDNRXHT | 43.95 | 138% | 115% | 122.53 | 346.56 |
| W417L/G418K/ | | | | | |
| G499R/A502K/ | | | | | |
| I503L/K504N/ | | | | | |
| E07K/H784A | | | | | |
| (Taq8M) | | | | | |
| TaqSS R677A | 32.3 | 101% | 84% | 206.9 | 2450.0 |

B. RNA activity table

| | IrT1 | % Tth | % Taq4M |
|---|---|---|---|
| Tth DN RX HT | 0.89 | 100% | 34% |
| Tth DN RX HT | 1.18 | 133% | 45% |
| H641A | | | |
| Tth DN RX HT | 1.34 | 151% | 51% |
| R748A | | | |
| Tth DN RX HT | 1.31 | 147% | 49% |
| H786A | | | |
| Tth DN RX HT | 1.59 | 179% | 60% |
| H786A/G506K/ | | | |
| Q509K (AKK) | | | |
| Taq DN RX HT | 2.65 | 298% | 100% |
| W417L/G418K/ | | | |
| E507Q/H784A | | | |
| (Taq 4M) | | | |
| Taq 4M G504K | 2.76 | 310% | 114% |
| Taq 4M H639A | 3.89 | 437% | 147% |
| Taq 4M R587A | 3.13 | 352% | 118% |
| Taq DN RX HT | 4.00 | 450% | 151% |
| W417L/G418K/ | | | |
| G499R/A502K/ | | | |
| 1503L/K504N/ | | | |
| E07K/H784A | | | |
| (Taq8M) | | | |
| TaqSS R677A | 2.22 | 249% | 84% |

[0408] TABLE 3
Rational arch mutations
DNA activity table

| | IdT | % Tth | % Taq4M | HP | X |
|---|---|---|---|---|---|
| Taq4M | 10.20 | 32% | 27% | 2.00 | 97.00 |
| P88E/P90E | | | | | |
| Taq4M | 26.30 | 82% | 69% | 103.6 | 2900 |
| G80E | | | | | |
| Taq4M | 36.45 | 114% | 95% | 19.71 | 749.69 |
| L109F/A110T | | | | | |

RNA activity table

| | IrT1 | % Tth | % Taq4M | |
|---|---|---|---|---|
| Taq4M | Taq4M | 0.10 | 11% | 4% |
| P88E/P90E | P88E/P90E | | | |
| Taq4M | Taq4M | 3.11 | 349% | 117% |
| G80E | G80E | | | |
| Taq 4M | Taq 4M | 2.45 | 275% | 92% |
| L109F/A110T | L109F/A110T | | | |

[0409] TABLE 4
Arch/thumb combinations
DNA activity table

| | IdT | % Tth | % Taq4M | HP | X |
|---|---|---|---|---|---|
| Taq W417L/ | 63.33 | 198% | 166% | 177.05 | 202.32 |
| G418K/E507K/ | | | | | |
| H784A/L109F/ | | | | | |
| A110T/G499R/ | | | | | |
| A502K/I503L/ | | | | | |
| G504K/E507K/ | | | | | |
| T514S (Taq SS) | | | | | |
| Taq P88E/P90E/ | 36.48 | 114% | 95% | 9.44 | 70.35 |
| W417L/G418K/ | | | | | |
| G499R/A502K/ | | | | | |
| 1503L/G504K/ | | | | | |
| E507K/T514S/ | | | | | |
| H784A | | | | | |

RNA activity table

| | IrT1 | % Tth | % Taq4M |
|---|---|---|---|
| Taq W417L/ | 3.16 | 355% | 119% |
| G418K/E507K/ | | | |
| H784A/L109F/ | | | |
| A110T/G499R/ | | | |
| A502K/I503L/ | | | |
| G504K/E507K/ | | | |
| T514S (Taq SS) | | | |
| Taq P88E/P90E/ | 0.22 | 25% | 8% |
| W417L/G418K/ | | | |
| G499R/A502K/ | | | |
| I503L/G504K/ | | | |
| E507K/T514S/ | | | |
| H784A | | | |

[0410] TABLE 5

Helix-hairpin-helix random mutagenesis
DNA activity table

| IdT | % Tth | % Taq4M | HP | X | |
|---|---|---|---|---|---|
| TaqSS | 23.4 | 73% | 61% | 25.7 | 1233.1 |
| K198N | | | | | |
| TaqSS | 25.6 | 80% | 67% | 13.4 | 699.1 |
| A205Q | | | | | |
| TaqSS | 11.2 | 35% | 29% | 1.9 | 209.4 |
| T204P | | | | | |
| TaqSS | 16.8 | 53% | 44% | 7.8 | 597.2 |
| 1200M/A205G | | | | | |
| TaqSS | 25.9 | 81% | 68% | 36.6 | 1429.8 |
| K203N | | | | | |
| Tth DN RX HT | 10.7 | 33% | 28% | 3.2 | 66.3 |
| H786A/P197R/K200R | | | | | |
| Tth DN RX HT | 11.5 | 36% | 30% | 6.1 | 327.5 |
| H786A/K205Y | | | | | |
| Tth DN RX HT | 18.3 | 57% | 48% | 2.1 | 98.8 |
| H786A/G203R | | | | | |

RNA activity table

| | IrT1 | % Tth | % Taq4M |
|---|---|---|---|
| TaqSS | 1.22 | 137% | 46% |
| K198N | | | |
| TaqSS | 0.62 | 70% | 23% |
| A205Q | | | |
| TaqSS | 0.36 | 40% | 14% |
| T204P | | | |
| TaqSS | 0.77 | 87% | 29% |
| 1200M/A205G | | | |
| TaqSS | 2.09 | 235% | 79% |
| K203N | | | |
| Tth DN RX HT | 0.47 | 52% | 18% |
| H786A/P197R/K200R | | | |
| Tth DN RX HT | 0.68 | 77% | 26% |
| H786A/K205Y | | | |
| Tth DN RX HT | 1.61 | 180% | 61% |
| H786A/G203R | | | |

[0411] TABLE 6

Random thumb mutations
DNA activity table

| | IdT | % Tth | % Taq4M | HP | X |
|---|---|---|---|---|---|
| Taq DN RX HT | 59.96 | 188% | 157% | 133.65 | 907.41 |
| W417L/G418K/ | | | | | |
| E507K/H784A/ | | | | | |
| G499R/A502K/ | | | | | |
| K504N/(M1-13) | | | | | |
| Taq DN RX HT | 46.74 | 146% | 122% | 123.11 | 822.61 |
| W417L/G418K/ | | | | | |
| /H784A/L500I/ | | | | | |
| Q507HA502K/ | | | | | |
| G504K (M1-36) | | | | | |
| Taq DN RX HT | 85.7 | 269% | 224% | 369.96 | 3752.12 |
| W417L/G418K/ | | | | | |
| G499R/A502K/ | | | | | |
| G504K/E507K/ | | | | | |
| H784A/T514S | | | | | |
| (M2-24) | | | | | |
| Taq DN RX HT | 76.7 | 240% | 201% | 355.87 | 2038.19 |
| W417L/G418K/ | | | | | |
| G499R/A502K/ | | | | | |
| G504K/E507K/ | | | | | |
| H784A/V518L | | | | | |
| (M2-06) | | | | | |

RNA activity table

| | IrT1 | % Tth | % Taq4M |
|---|---|---|---|
| Taq DN RX HT | 2.55 | 287% | 96% |
| W417L/G418K/ | | | |
| E507K/H784A/G499R/ | | | |
| A502K/K504N/ (M1-13) | | | |
| Taq DN RX HT | 2.71 | 304% | 102% |
| W417L/G418K/ | | | |
| /H784A/L5001/Q507H | | | |
| A502K/G504K (M1-36) | | | |
| Taq DN RX HT | 4.43 | 498% | 167% |
| W417L/G418K/G499R/ | | | |
| A502K/G504K/E507K/ | | | |
| H784A/T514S (M2-24) | | | |
| Taq DN RX HT | 3.56 | 400% | 134% |
| W417L/G418K/G499R/ | | | |
| A502K/G504K/E507K/ | | | |
| H784A/V518L (M2-06) | | | |

[0412] TABLE 7 !Chimeric mutants

A. DNA activity table

| | IdT2 | % TthAKK | HP | X |
|---|---|---|---|---|
| TthAKK | 34.18 | 100% | 5 | 393 |
| Taq 4M G504K | 40.19 | 105% | 28 | 1991 |
| Tfi DN 2M | 36.60 | 106% | 289 | 1326 |
| Tsc DN 2M | 25.49 | 75% | 283 | 2573 |
| TaqTth AKK | 63.89 | 187% | 32 | 1658 |
| TthTaq 4M G504K | 25.03 | 73% | 8 | 627 |
| TfiTthAKK | 34.13 | 100% | 15 | 459 |
| TscTthAKK | 35.23 | 103% | 29 | 2703 |
| TfiTaq 4M G504K | 35.69 | 104% | 37 | 872 |
| TscTaq 4M G504K | 30.04 | 88% | 25 | 2008 |

B. RNA activity table

| | IrT3 | % TthAKK |
|---|---|---|
| TthAKK | 2.27 | 100% |
| Taq 4M G504K | 2.31 | 102% |
| Tfi DN 2M | 0.20 | 9% |
| Tsc DN 2M | 0.29 | 13% |
| TaqTthAKK | 6.81 | 300% |
| TthTaq 4M G504K | 1.09 | 48% |
| TfiTthAKK | 1.24 | 55% |
| TscTthAKK | 9.65 | 4.25% |
| TfiTaq 4M G504K | 1.05 | 46% |
| TscTaq 4M G504K | 2.95 | 130% |

[0413] All publications and patents mentioned in the above specification are herein incorporated by reference. Various modifications and variations of the described method and system of the invention will be apparent to those skilled in the art without departing from the scope and spirit of the invention. Although the invention has been described in connection with specific preferred embodiments, it should be understood that the invention as claimed should not be unduly limited to such specific embodiments. Indeed, various modifications of the described modes for carrying out the invention which are obvious to those skilled in the relevant fields are intended to be within the scope of the following claims.

The application's sequence listing, which the Patent Office published only in electronic form, follows.

SEQUENCE LISTING (280 sequences)

SEQ ID NO: 1 - DNA, 2506 bp, Thermus aquaticus
atgagggggatgctgcccctctttgagcccaagggccgggtcctcctggtggacggccaccacctggcctaccgcaccttccacgccctgaagggcctcaccaccagccggggggagccggtgcaggcggtctacggcttcgccaagagcctcctcaaggccctcaaggaggacggggacgcggtgatcgtggtctttgacgccaaggccccctccttccgccacgaggcctacggggggtacaaggcgggccgggcccccacgccggaggactttccccggcaactcgccctcatcaaggagctggtggacctcctggggctggcgcgcctcgaggtcccgggctacgaggcggacgacgtcctggccagcctggccaagaaggcggaaaaggagggctacgaggtccgcatcctcaccgccgacaaagacctttaccagctcctttccgaccgcatccacgtcctccaccccgaggggtacctcatcaccccggcctggctttgggaaaagtacggcctgaggcccgaccagtgggccgactaccgggccctgaccggggacgagtccgacaaccttcccggggtcaagggcatcggggagaagacggcgaggaagcttctggaggagtgggggagcctggaagccctcctcaagaacctggaccggctgaagcccgccatccgggagaagatcctggcccacatggacgatctgaagctctcctgggacctggccaaggtgcgcaccgacctgcccctggaggtggacttcgccaaaaggcgggagcccgaccgggagaggcttagggcctttctggagaggcttgagtttggcagcctcctccacgagttcggccttctggaaagccccaaggccctggaggaggccccctggcccccgccggaaggggccttcgtgggctttgtgctttcccgcaaggagcccatgtgggccgatcttctggccctggccgccgccagggggggccgggtccaccgggcccccgagccttataaagccctcagggacctgaaggaggcgcgggggcttctcgccaaagacctgagcgttctggccctgagggaaggccttggcctcccgcccggcgacgaccccatgctcctcgcctacctcctggacccttccaacaccacccccgagggggtggcccggcgctacggcggggagtggacggaggaggcgggggagcgggccgccctttccgagaggctcttcgccaacctgtgggggaggcttgagggggaggagaggctcctttggctttaccgggaggtggagaggcccctttccgctgtcctggcccacatggaggccacgggggtgcgcctggacgtggcctatctcagggccttgtccctggaggtggccgaggagatcgcccgcctcgaggccgaggtcttccgcctggccggccaccccttcaacctcaactcccgggaccagctggaaagggtcctctttgacgagctagggcttcccgccatcggcaagacggagaagaccggcaagcgctccaccagcgccgccgtcctggaggccctccgcgaggcccaccccatcgtggagaagatcctgcagtaccgggagctcaccaagctgaagagcacctacattgaccccttgccggacctcatccaccccaggacgggccgcctccacacccgcttcaaccagacggccacggccacgggcaggctaagtagctccgatcccaacctccagaacatccccgtccgcaccccgcttgggcagaggatccgccgggccttcatcgccgaggaggggtggctattggtggccctggactatagccagatagagctcagggtgctggcccacctctccggcgacgagaacctgatccgggtcttccaggaggggcgggacatccacacggagaccgccagctggatgttcggcgtcccccgggaggccgtggaccccctgatgcgccgggcggccaagaccatcaacttcggggtcctctacggcatgtcggcccaccgcctctcccaggagctagccatcccttacgaggaggcccaggccttcattgagcgctactttcagagcttccccaaggtgcgggcctggattgagaagaccctggaggagggcaggaggcgggggtacgtggagaccctcttcggccgccgccgctacgtgccagacctagaggcccgggtgaagagcgtgcgggaggcggccgagcgcatggccttcaacatgcccgtccagggcaccgccgccgacctcatgaagctggctatggtgaagctcttccccaggctggaggaaatgggggccaggatgctccttcaggtccacgacgagctggtcctcgaggccccaaaagagagggcggaggccgtggcccggctggccaaggaggtcatggagggggtgtatcccctggccgtgcccctggaggtggaggtggggataggggaggactggctctccgccaaggagtgataccacc

SEQ ID NO: 2 - DNA, 2496 bp, thermus flavus
atggcgatgcttcccctctttgagcccaaaggccgcgtgctcctggtggacggccaccacctggcctaccgcaccttctttgccctcaagggcctcaccaccagccgcggcgaacccgttcaggcggtctacggcttcgccaaaagcctcctcaaggccctgaaggaggacggggacgtggtggtggtggtctttgacgccaaggccccctccttccgccacgaggcctacgaggcctacaaggcgggccgggcccccaccccggaggactttccccggcagctggccctcatcaaggagttggtggacctcctaggccttgtgcggctggaggttcccggctttgaggcggacgacgtgctggccaccctggccaagcgggcggaaaaggaggggtacgaggtgcgcatcctcactgccgaccgcgacctctaccagctcctttcggagcgcatcgccatcctccaccctgaggggtacctgatcaccccggcgtggctttacgagaagtacggcctgcgcccggagcagtgggtggactaccgggccctggcgggggacccctcggataacatccccggggtgaagggcatcggggagaagaccgcccagaggctcatccgcgagtgggggagcctggaaaacctcttccagcacctggaccaggtgaagccctccttgcgggagaagctccaggcgggcatggaggccctggccctttcccggaagctttcccaggtgcacactgacctgcccctggaggtggacttcgggaggcgccgcacacccaacctggagggtctgcgggcttttttggagcggttggagtttggaagcctcctccacgagttcggcctcctggaggggccgaaggcggcagaggaggccccctggccccctccggaaggggcttttttgggcttttccttttcccgtcccgagcccatgtgggccgagcttctggccctggctggggcgtgggaggggcgcctccatcgggcacaagacccccttaggggcctgagggaccttaagggggtgcggggaatcctggccaaggacctggcggttttggccctgcgggagggcctggacctcttcccagaggacgaccccatgctcctggcctaccttctggacccctccaacaccacccctgagggggtggcccggcgttacgggggggagtggacggaggatgcgggggagagggccctcctggccgagcgcctcttccagaccctaaaggagcgccttaagggagaagaacgcctgctttggctttacgaggaggtggagaagccgctttcccgggtgttggcccggatggaggccacgggggtccggctggacgtggcctacctccaggccctctccctggaggtggaggcggaggtgcgccagctggaggaggaggtcttccgcctggccggccaccccttcaacctcaactcccgcgaccagctggagcgggtgctctttgacgagctgggcctgcctgccatcggcaagacggagaagacggggaaacgctccaccagcgctgccgtgctggaggccctgcgagaggcccaccccatcgtggaccgcatcctgcagtaccgggagctcaccaagctcaagaacacctacatagaccccctgcccgccctggtccaccccaagaccggccggctccacacccgcttcaaccagacggccaccgccacgggcaggctttccagctccgaccccaacctgcagaacatccccgtgcgcacccctctgggccagcgcatccgccgagccttcgtggccgaggagggctgggtgctggtggtcttggactacagccagattgagcttcgggtcctggcccacctctccggggacgagaacctgatccgggtctttcaggaggggagggacatccacacccagaccgccagctggatgttcggcgtttcccccgaaggggtagaccctctgatgcgccgggcggccaagaccatcaacttcggggtgctctacggcatgtccgcccaccgcctctccggggagctttccatcccctacgaggaggcggtggccttcattgagcgctacttccagagctaccccaaggtgcgggcctggattgaggggaccctcgaggagggccgccggcgggggtatgtggagaccctcttcggccgccggcgctatgtgcccgacctcaacgcccgggtgaagagcgtgcgcgaggcggcggagcgcatggccttcaacatgccggtccagggcaccgccgccgacctcatgaagctggccatggtgcggcttttcccccggcttcaggaactgggggcgaggatgcttttgcaggtgcacgacgagctggtcctcgaggcccccaaggaccgggcggagagggtagccgctttggccaaggaggtcatggagggggtctggcccctgcaggtgcccctggaggtggaggtgggcctgggggaggactggctctccgccaaggagtag

SEQ ID NO: 3 - DNA, 2511 bp, Thermus thermophilus
atgaattccgaggcgatgcttccgctctttgaacccaaaggccgggtcctcctggtggacggccaccacctggcctaccgcaccttcttcgccctgaagggcctcaccacgagccggggcgaaccggtgcaggcggtctacggcttcgccaagagcctcctcaaggccctgaaggaggacgggtacaaggccgtcttcgtggtctttgacgccaaggccccctccttccgccacgaggcctacgaggcctacaaggcggggagggccccgacccccgaggacttcccccggcagctcgccctcatcaaggagctggtggacctcctggggtttacccgcctcgaggtccccggctacgaggcggacgacgttctcgccaccctggccaagaaggcggaaaaggaggggtacgaggtgcgcatcctcaccgccgaccgcgacctctaccaactcgtctccgaccgcgtcgccgtcctccaccccgagggccacctcatcaccccggagtggctttgggagaagtacggcctcaggccggagcagtgggtggacttccgcgccctcgtgggggacccctccgacaacctccccggggtcaagggcatcggggagaagaccgccctcaagctcctcaaggagtggggaagcctggaaaacctcctcaagaacctggaccgggtaaagccagaaaacgtccgggagaagatcaaggcccacctggaagacctcaggctctccttggagctctcccgggtgcgcaccgacctccccctggaggtggacctcgcccaggggcgggagcccgaccgggaggggcttagggccttcctggagaggctggagttcggcagcctcctccacgagttcggcctcctggaggcccccgcccccctggaggaggccccctggcccccgccggaaggggccttcgtgggcttcgtcctctcccgccccgagcccatgtgggcggagcttaaagccctggccgcctgcagggacggccgggtgcaccgggcagcagaccccttggcggggctaaaggacctcaaggaggtccggggcctcctcgccaaggacctcgccgtcttggcctcgagggaggggctagacctcgtgcccggggacgaccccatgctcctcgcctacctcctggacccctccaacaccacccccgagggggtggcgcggcgctacgggggggagtggacggaggacgccgcccaccgggccctcctctcggagaggctccatcggaacctccttaagcgcctcgagggggaggagaagctcctttggctctaccacgaggtggaaaagcccctctcccgggtcctggcccacatggaggccaccggggtacggcgggacgtggcctaccttcaggccctttccctggagcttgcggaggagatccgccgcctcgaggaggaggtcttccgcttggcgggccaccccttcaacctcaactcccgggaccagctggaaagggtgctctttgacgagcttaggcttcccgccttggggaagacgcaaaagacaggcaagcgctccaccagcgccgcggtgctggaggccctacgggaggcccaccccatcgtggagaagatcctccagcaccgggagctcaccaagctcaagaacacctacgtggaccccctcccaagcctcgtccacccgaggacgggccgcctccacacccgcttcaaccagacggccacggccacggggaggcttagtagctccgaccccaacctgcagaacatccccgtccgcacccccttgggccagaggatccgccgggccttcgtggccgaggcgggttgggcgttggtggccctggactatagccagatagagctccgcgtcctcgcccacctctccggggacgaaaacctgatcagggtcttccaggaggggaaggacatccacacccagaccgcaagctggatgttcggcgtccccccggaggccgtggaccccctgatgcgccgggcggccaagacggtgaacttcggcgtcctctacggcatgtccgcccataggctctcccaggagcttgccatcccctacgaggaggcggtggcctttatagagcgctacttccaaagcttccccaaggtgcgggcctggatagaaaagaccctggaggaggggaggaagcggggctacgtggaaaccctcttcggaagaaggcgctacgtgcccgacctcaacgcccgggtgaagagcgtcagggaggccgcggagcgcatggccttcaacatgcccgtccagggcaccgccgccgacctcatgaagctcgccatggtgaagctcttcccccgcctccgggagatgggggcccgcatgctcctccaggtccacgacgagctcctcctggaggccccccaagcgcgggccgaggaggtggcggctttggccaaggaggccatggagaaggcctatcccctcgccgtgcccctggaggtggaggtggggatgggggaggactggctttccgccaagggttag

SEQ ID NO: 4 - protein, 832 aa, Thermus aquaticus [sequence omitted]

SEQ ID NO: 5 - protein, 831 aa, thermus flavus
MAMLPLFEPKGRVLLVDGHHLAYRTFFALKGLTTSRGEPVQAVYGFAKSLLKALKEDGDVVVVVFDAKAPSFRHEAYEAYKAGRAPTPEDFPRQLALIKELVDLLGLVRLEVPGFEADDVLATLAKRAEKEGYEVRILTADRDLYQLLSERIAILHPEGYLITPAWLYEKYGLRPEQWVDYRALAGDPSDNIPGVKGIGEKTAQRLIREWGSLENLFQHLDQVKPSLREKLQAGMEALALSRKLSQVHTDLPLEVDFGRRRTPNLEGLRAFLERLEFGSLLHEFGLLEGPKAAEEAPWPPPEGAFLGFSFSRPEPMWAELLALAGAWEGRLHRAQDPLRGLRDLKGVRGILAKDLAVLALREGLDLFPEDDPMLLAYLLDPSNTTPEGVARRYGGEWTEDAGERALLAERLFQTLKERLKGEERLLWLYEEVEKPLSRVLARMEATGVRLDVAYLQALSLEVEAEVRQLEEEVFRLAGHPFNLNSRDQLERVLFDELGLPAIGKTEKTGKRSTSAAVLEALREAHPIVDRILQYRELTKLKNTYIDPLPALVHPKTGRLHTRFNQTATATGRLSSSDPNLQNIPVRTPLGQRIRRAFVAEEGWVLVVLDYSQIELRVLAHLSGDENLIRVFQEGRDIHTQTASWMFGVSPEGVDPLMRRAAKTINFGVLYGMSAHRLSGELSIPYEEAVAFIERYFQSYPKVRAWIEGTLEEGRRRGYVETLFGRRRYVPDLNARVKSVREAAERMAFNMPVQGTAADLMKLAMVRLFPRLQELGARMLLQVHDELVLEAPKDRAERVAALAKEVMEGVWPLQVPLEVEVGLGEDWLSAKE

SEQ ID NO: 6 - protein, 836 aa, Thermus thermophilus
MNSEAMLPLFEPKGRVLLVDGHHLAYRTFFALKGLTTSRGEPVQAVYGFAKSLLKALKEDGYKAVFVVFDAKAPSFRHEAYEAYKAGRAPTPEDFPRQLALIKELVDLLGFTRLEVPGYEADDVLATLAKKAEKEGYEVRILTADRDLYQLVSDRVAVLHPEGHLITPEWLWEKYGLRPEQWVDFRALVGDPSDNLPGVKGIGEKTALKLLKEWGSLENLLKNLDRVKPENVREKIKAHLEDLRLSLELSRVRTDLPLEVDLAQGREPDREGLRAFLERLEFGSLLHEFGLLEAPAPLEEAPWPPPEGAFVGFVLSRPEPMWAELKALAACRDGRVHRAADPLAGLKDLKEVRGLLAKDLAVLASREGLDLVPGDDPMLLAYLLDPSNTTPEGVARRYGGEWTEDAAHRALLSERLHRNLLKRLEGEEKLLWLYHEVEKPLSRVLAHMEATGVRRDVAYLQALSLELAEEIRRLEEEVFRLAGHPFNLNSRDQLERVLFDELRLPALGKTQKTGKRSTSAAVLEALREAHPIVEKILQHRELTKLKNTYVDPLPSLVHPRTGRLHTRFNQTATATGRLSSSDPNLQNIPVRTPLGQRIRRAFVAEAGWALVALDYSQIELRVLAHLSGDENLIRVFQEGKDIHTQTASWMFGVPPEAVDPLMRRAAKTVNFGVLYGMSAHRLSQELAIPYEEAVAFIERYFQSFPKVRAWIEKTLEEGRKRGYVETLFGRRRYVPDLNARVKSVREAAERMAFNMPVQGTAADLMKLAMVKLFPRLREMGARMLLQVHDELLLEAPQARAEEVAALAKEAMEKAYPLAVPLEVEVGMGEDWLSAKG

SEQ ID NO: 7 - DNA, 2502 bp, Artificial Sequence
  Description of Artificial Sequence:  Synthetic
atgnnggcgatgcttcccctctttgagcccaaaggccgggtcctcctggtggacggccaccacctggcctaccgcaccttcttcgccctgaagggcctcaccaccagccggggcgaaccggtgcaggcggtctacggcttcgccaagagcctcctcaaggccctgaaggaggacggggacnnggcggtgntcgtggtctttgacgccaaggccccctccttccgccacgaggcctacgaggcctacaaggcgggccgggcccccaccccggaggactttccccggcagctcgccctcatcaaggagctggtggacctcctggggcttgcgcgcctcgaggtccccggctacgaggcggacgacgtnctggccaccctggccaagaaggcggaaaaggaggggtacgaggtgcgcatcctcaccgccgaccgcgacctctaccagctcctttccgaccgcatcgccgtcctccaccccgaggggtacctcatcaccccggcgtggctttgggagaagtacggcctgaggccggagcagtgggtggactaccgggccctggcgggggacccctccgacaacctccccggggtcaagggcatcggggagaagaccgcccngaagctcctcnaggagtgggggagcctggaaaacctcctcaagaacctggaccgggtgaagcccgccntccgggagaagatccaggcccacatggangacctgangctctcctgggagctntcccaggtgcgcaccgacctgcccctggaggtggacttcgccaagnggcgggagcccgaccgggaggggcttagggcctttctggagaggctggagtttggcagcctcctccacgagttcggcctcctggagggccccaaggccctggaggaggccccctggcccccgccggaaggggccttcgtgggctttgtcctttcccgccccgagcccatgtgggccgagcttctggccctggccgccgccagggagggccgggtccaccgggcaccagacccctttangggcctnagggacctnaaggaggtgcggggnctcctcgccaaggacctggccgttttggccctgagggagggcctngacctcntgcccggggacgaccccatgctcctcgcctacctcctggacccctccaacaccacccccgagggggtggcccggcgctacgggggggagtggacggaggangcgggggagcgggccctcctntccgagaggctcttccngaacctnnngcagcgccttgagggggaggagaggctcctttggctttaccaggaggtggagaagcccctttcccgggtcctggcccacatggaggccacgggggtncggctggacgtggcctacctccaggccctntccctggaggtggcggaggagatccgccgcctcgaggaggaggtcttccgcctggccggccaccccttcaacctcaactcccgggaccagctggaaagggtgctctttgacgagctngggcttcccgccatcggcaagacggagaagacnggcaagcgctccaccagcgccgccgtgctggaggccctncgngaggcccaccccatcgtggagaagatcctgcagtaccgggagctcaccaagctcaagaacacctacatngaccccctgccngncctcgtccaccccaggacgggccgcctccacacccgcttcaaccagacggccacggccacgggcaggcttagtagctccgaccccaacctgcagaacatccccgtccgcaccccnctgggccagaggatccgccgggccttcgtggccgaggagggntgggtgttggtggccctggactatagccagatagagctccgggtcctggcccacctctccggggacgagaacctgatccgggtcttccaggaggggagggacatccacacccagaccgccagctggatgttcggcgtccccccggaggccgtggaccccctgatgcgccgggcggccaagaccatcaacttcggggtcctctacggcatgtccgcccaccgcctctcccaggagcttgccatcccctacgaggaggcggtggccttcattgagcgctacttccagagcttccccaaggtgcgggcctggattgagaagaccctggaggagggcaggaggcgggggtacgtggagaccctcttcggccgccggcgctacgtgcccgacctcaacgcccgggtgaagagcgtgcgggaggcggcggagcgcatggccttcaacatgcccgtccagggcaccgccgccgacctcatgaagctggccatggtgaagctcttcccccggctncaggaaatgggggccaggatgctcctncaggtccacgacgagctggtcctcgaggcccccaaagagcgggcggaggnggtggccgctttggccaaggaggtcatggagggggtctatcccctggccgtgcccctggaggtggaggtggggatgggggaggactggctctccgccaaggagtag

SEQ ID NO: 8 - protein, 833 aa, Artificial Sequence
  Description of Artificial Sequence:  Synthetic
MXAMLPLFEPKGRVLLVDGHHLAYRTFFALKGLTTSRGEPVQAVYGFAKSLLKALKEDGDAVXVVFDAKAPSFRHEAYEAYKAGRAPTPEDFPRQLALIKELVDLLGLXRLEVPGYEADDVLATLAKKAEKEGYEVRILTADRDLYQLLSDRIAVLHPEGYLITPAWLWEKYGLRPEQWVDYRALXGDPSDNLPGVKGIGEKTAXKLLXEWGSLENLLKNLDRVKPXXREKIXAHMEDLXLSXXLSXVRTDLPLEVDFAXRREPDREGLRAFLERLEFGSLLHEFGLLEXPKALEEAPWPPPEGAFVGFVLSRPEPMWAELLALAAARXGRVHRAXDPLXGLRDLKEVRGLLAKDLAVLALREGLDLXPGDDPMLLAYLLDPSNTTPEGVARRYGGEWTEDAGERALLSERLFXNLXXRLEGEERLLWLYXEVEKPLSRVLAHMEATGVRLDVAYLQALSLEVAEEIRRLEEEVFRLAGHPFNLNSRDQLERVLFDELGLPAIGKTEKTGKRSTSAAVLEALREAHPIVEKILQYRELTKLKNTYIDPLPXLVHPRTGRLHTRFNQTATATGRLSSSDPNLQNIPVRTPLGQRIRRAFVAEEGWXLVALDYSQIELRVLAHLSGDENLIRVFQEGRDIHTQTASWMFGVPPEAVDPLMRRAAKTINFGVLYGMSAHRLSQELAIPYEEAVAFIERYFQSFPKVRAWIEKTLEEGRRRGYVETLFGRRRYVPDLNARVKSVREAAERMAFNMPVQGTAADLMKLAMVKLFPRLXEMGARMLLQVHDELVLEAPKXRAEXVAALAKEVMEGVYPLAVPLEVEVGXGEDWLSAKEX

SEQ ID NO: 9 - DNA, 53 bp, Artificial Sequence
  Description of Artificial Sequence:  Synthetic
uucgcuuucuucccuuccuuucucgccacguucgccggcuuuccccgucaagc

SEQ ID NO: 10 - DNA, 30 bp, Artificial Sequence
  Description of Artificial Sequence:  Synthetic
acggggaaagccggcgaacgtggcgagaaa

SEQ ID NO: 11 - DNA, 26 bp, Artificial Sequence
  Description of Artificial Sequence:  Synthetic
attagaaaggaagggaagaaagcgaa

SEQ ID NO: 12 - DNA, 30 bp, Artificial Sequence
  Description of Artificial Sequence:  Synthetic
acggggaaagccggcgaacgtggcgagaac

SEQ ID NO: 13 - DNA, 30 bp, Artificial Sequence
  Description of Artificial Sequence:  Synthetic
cttgacggggaaagccggcgaacgtggcgc

SEQ ID NO: 14 - DNA, 23 bp, Artificial Sequence
  Description of Artificial Sequence:  Synthetic
agaaaggaagggaagaaagcgaa

SEQ ID NO: 15 - DNA, 27 bp, Artificial Sequence
  Description of Artificial Sequence:  Synthetic
agggagaaggcaactggaccgaaggcc

SEQ ID NO: 16 - DNA, 35 bp, Artificial Sequence
  misc_feature (1): This 5' end has a fluorescein label.
  misc_feature (35): This 3' end is modified with a dideoxynucleotide.; Description of Artificial Sequence:  Synthetic
ncgaaattaatacgcttgtggagaaggagttcatn

SEQ ID NO: 17 - DNA, 640 bp, Artificial Sequence
  Description of Artificial Sequence:  Synthetic
gggagcccagcuaugaacuccuucuccacaagcgccuucgguccaguugccuucucccuggggcugcuccugguguugccugcugccuucccugccccaguacccccaggagaagauuccaaagauguagccgccccacacagacagccacucaccucuucagaacgaauugacaaacaaauucgguacauccucgacggcaucucagcccugagaaaggagacauguaacaagaguaacaugugugaaagcagcaaagaggcacuggcagaaaacaaccugaaccuuccaaagauggcugaaaaagauggaugcuuccaaucuggauucaaugaggagacuugccuggugaaaaucaucacuggucuuuuggaguuugagguauaccuagaguaccuccagaacagauuugagaguagugaggaacaagccagagcuguccagaugaguacaaaaguccugauccaguuccugcagaaaaaggcaaagaaucuagaugcaauaaccaccccugacccaaccacaaaugccagccugcugacgaagcugcaggcacagaaccaguggcugcaggacaugacaacucaucucauucugcgcagcuuuaaggaguuccugcaguccagccugagggcucuuc

SEQ ID NO: 18 - DNA, 53 bp, Artificial Sequence
  Description of Artificial Sequence:  Synthetic
gctatgaactccttctccacaagcgccttcggtccagttgccttctccctggg

SEQ ID NO: 19 - protein, 214 aa, Artificial Sequence
  Description of Artificial Sequence:  Synthetic
DPSNTTPEGVARRYGGEWTEEAGERAALSERLFANLWGRLEGEERLLWLYREVERPLSAVLAHMEATGVRLDVAYLRALSLEVAEEIARLEAEVFRLAGHPFNLNSRDQLERVLFDELGLPAIGKTEKTGKRSTSAAVLEALREAHPIVEKILQYRELTKLKSTYIDPLPDLIHPRTGRLHTRFNQTATATGRLSSSDPNLQNIPVRTPLGQRI

SEQ ID NO: 20 - protein, 214 aa, Artificial Sequence
  Description of Artificial Sequence:  Synthetic
DPSNTTPEGVARRYGGEWTEDAAHRALLSERLHRNLLKRLEGEEKLLWLYHEVEKPLSRVLAHMEATGVRRDVAYLQALSLELAEEIRRLEEEVFRLAGHPFNLNSRDQLERVLFDELRLPALGKTQKTGKRSTSAAVLEALREAHPIVEKILQHRELTKLKNTYVDPLPSLVHPRTGRLHTRFNQTATATGRLSSSDPNLQNIPVRTPLGQRI

SEQ ID NO: 21 - DNA, 16 bp, Artificial Sequence
  misc_feature (1): This 5' end has a fluorescein label.
  misc_feature (6): The residue at this position is a cy3 abasic linker group.; Description of Artificial Sequence:  Synthetic
ncgctntctcgctcgc

SEQ ID NO: 22 - DNA, 18 bp, Artificial Sequence
  Description of Artificial Sequence:  Synthetic
acggaacgagcgtctttg

SEQ ID NO: 23 - DNA, 32 bp, Artificial Sequence
  Description of Artificial Sequence:  Synthetic
gcgagcgagacagcgaaagacgcucguuccgu

SEQ ID NO: 24 - DNA, 32 bp, Artificial Sequence
  Description of Artificial Sequence:  Synthetic
gcgagcgagacagcgaaagacgctcgttccgt

SEQ ID NO: 25 - DNA, 29 bp, Artificial Sequence
  Description of Artificial Sequence:  Synthetic
acggaacgagcgtctttcatctgtcaatc

SEQ ID NO: 26 - DNA, 17 bp, Artificial Sequence
  misc_feature (1): This 5' end is labeled with tetrachlororfluorescein.; Description of Artificial Sequence:  Synthetic
nttttcaactgccgtga

SEQ ID NO: 27 - DNA, 37 bp, Artificial Sequence
  misc_feature (1): This 5' end is modified with a biotin-streptavitin complex.; Description of Artificial Sequence:  Synthetic
nucacggcaguuggugcgccucggaacgaggcgcacg

SEQ ID NO: 28 - DNA, 36 bp, Artificial Sequence
  Description of Artificial Sequence:  Synthetic
tcacggcagttggtgcgcctcggaacgaggcgcacg

SEQ ID NO: 29 - DNA, 30 bp, Artificial Sequence
  misc_feature (30): This 3' end is modified with an amine moiety.; Description of Artificial Sequence:  Synthetic
cggaggaagcagttggtgcgcctcgttaan

SEQ ID NO: 30 - DNA, 23 bp, Artificial Sequence
  misc_feature (1): This 5' end is labeled with fluorescein.; Description of Artificial Sequence:  Synthetic
ntccttctcaactgcttcctccg

SEQ ID NO: 31 - DNA, 28 bp, Artificial Sequence
  misc_feature (28): This 3' end is modified with a biotin moiety.; Description of Artificial Sequence:  Synthetic
aacgaggcgcacctcaaatctccctttn

SEQ ID NO: 32 - DNA, 17 bp, Artificial Sequence
  misc_feature (1): This 5' end is labeled with fluorescein.; Description of Artificial Sequence:  Synthetic
nttttcgctgtctcgct

SEQ ID NO: 33 - DNA, 13 bp, Artificial Sequence
  Description of Artificial Sequence:  Synthetic
acgagcgtctttg

SEQ ID NO: 34 - DNA, 26 bp, Artificial Sequence
  misc_feature (1): This 5' end is labeled with fluorescein.; Description of Artificial Sequence:  Synthetic
nagcgagacagcgaaagacgctcgtt

SEQ ID NO: 35 - DNA, 26 bp, Artificial Sequence
  Description of Artificial Sequence:  Synthetic
ucacggcaguuggugcggaacgcacg

SEQ ID NO: 36 - DNA, 26 bp, Artificial Sequence
  Description of Artificial Sequence:  Synthetic
tcacggcagttggtgcggaacgcacg

SEQ ID NO: 37 - DNA, 36 bp, Artificial Sequence
  Description of Artificial Sequence:  Synthetic
cacgaattcggggatgctgcccctctttgagcccaa

SEQ ID NO: 38 - DNA, 34 bp, Artificial Sequence
  Description of Artificial Sequence:  Synthetic
gtgagatctatcactccttggcggagagccagtc

SEQ ID NO: 39 - DNA, 2502 bp, Artificial Sequence
  Description of Artificial Sequence:  Synthetic
atgaattcggggatgctgcccctctttgagcccaagggccgggtcctcctggtggacggccaccacctggcctaccgcaccttccacgccctgaagggcctcaccaccagccggggggagccggtgcaggcggtctacggcttcgccaagagcctcctcaaggccctcaaggaggacggggacgcggtgatcgtggtctttgacgccaaggccccctccttccgccacgaggcctacggggggtacaaggcgggccgggcccccacgccggaggactttccccggcaactcgccctcatcaaggagctggtggacctcctggggctggcgcgcctcgaggtcccgggctacgaggcggacgacgtcctggccagcctggccaagaaggcggaaaaggagggctacgaggtccgcatcctcaccgccgacaaagacctttaccagctcctttccgaccgcatccacgtcctccaccccgaggggtacctcatcaccccggcctggctttgggaaaagtacggcctgaggcccgaccagtgggccgactaccgggccctgaccggggacgagtccgacaaccttcccggggtcaagggcatcggggagaagacggcgaggaagcttctggaggagtgggggagcctggaagccctcctcaagaacctggaccggctgaagcccgccatccgggagaagatcctggcccacatggacgatctgaagctctcctgggacctggccaaggtgcgcaccgacctgcccctggaggtggacttcgccaaaaggcgggagcccgaccgggagaggcttagggcctttctggagaggcttgagtttggcagcctcctccacgagttcggccttctggaaagccccaaggccctggaggaggccccctggcccccgccggaaggggccttcgtgggctttgtgctttcccgcaaggagcccatgtgggccgatcttctggccctggccgccgccagggggggccgggtccaccgggcccccgagccttataaagccctcagggacctgaaggaggcgcgggggcttctcgccaaagacctgagcgttctggccctgagggaaggccttggcctcccgcccggcgacgaccccatgctcctcgcctacctcctggacccttccaacaccacccccgagggggtggcccggcgctacggcggggagtggacggaggaggcgggggagcgggccgccctttccgagaggctcttcgccaacctgtgggggaggcttgagggggaggagaggctcctttggctttaccgggaggtggagaggcccctttccgctgtcctggcccacatggaggccacgggggtgcgcctggacgtggcctatctcagggccttgtccctggaggtggccggggagatcgcccgcctcgaggccgaggtcttccgcctggccggccaccccttcaacctcaactcccgggaccagctggaaagggtcctctttgacgagctagggcttcccgccatcggcaagacggagaagaccggcaagcgctccaccagcgccgccgtcctggaggccctccgcgaggcccaccccatcgtggagaagatcctgcagtaccgggagctcaccaagctgaagagcacctacattgaccccttgccggacctcatccaccccaggacgggccgcctccacacccgcttcaaccagacggccacggccacgggcaggctaagtagctccgatcccaacctccagaacatccccgtccgcaccccgcttgggcagaggatccgccgggccttcatcgccgaggaggggtggctattggtggccctggactatagccagatagagctcagggtgctggcccacctctccggcgacgagaacctgatccgggtcttccaggaggggcgggacatccacacggagaccgccagctggatgttcggcgtcccccgggaggccgtggaccccctgatgcgccgggcggccaagaccatcaacttcggggtcctctacggcatgtcggcccaccgcctctcccaggagctagccatcccttacgaggaggcccaggccttcattgagcgctactttcagagcttccccaaggtgcgggcctggattgagaagaccctggaggagggcaggaggcgggggtacgtggagaccctcttcggccgccgccgctacgtgccagacctagaggcccgggtgaagagcgtgcgggaggcggccgagcgcatggccttcaacatgcccgtccggggcaccgccgccgacctcatgaagctggctatggtgaagctcttccccaggctggaggaaatgggggccaggatgctccttcaggtccacgacgagctggtcctcgaggccccaaaagagagggcggaggccgtggcccggctggccaaggaggtcatggagggggtgtatcccctggccgtgcccctggaggtggaggtggggataggggaggactggctctccgccaaggagtga

SEQ ID NO: 40 - protein, 833 aa, Artificial Sequence
  Description of Artificial Sequence:  Synthetic
MNSGMLPLFEPKGRVLLVDGHHLAYRTFHALKGLTTSRGEPVQAVYGFAKSLLKALKEDGDAVIVVFDAKAPSFRHEAYGGYKAGRAPTPEDFPRQLALIKELVDLLGLARLEVPGYEADDVLASLAKKAEKEGYEVRILTADKDLYQLLSDRIHVLHPEGYLITPAWLWEKYGLRPDQWADYRALTGDESDNLPGVKGIGEKTARKLLEEWGSLEALLKNLDRLKPAIREKILAHMDDLKLSWDLAKVRTDLPLEVDFAKRREPDRERLRAFLERLEFGSLLHEFGLLESPKALEEAPWPPPEGAFVGFVLSRKEPMWADLLALAAARGGRVHRAPEPYKALRDLKEARGLLAKDLSVLALREGLGLPPGDDPMLLAYLLDPSNTTPEGVARRYGGEWTEEAGERAALSERLFANLWGRLEGEERLLWLYREVERPLSAVLAHMEATGVRLDVAYLRALSLEVAGEIARLEAEVFRLAGHPFNLNSRDQLERVLFDELGLPAIGKTEKTGKRSTSAAVLEALREAHPIVEKILQYRELTKLKSTYIDPLPDLIHPRTGRLHTRFNQTATATGRLSSSDPNLQNIPVRTPLGQRIRRAFIAEEGWLLVALDYSQIELRVLAHLSGDENLIRVFQEGRDIHTETASWMFGVPREAVDPLMRRAAKTINFGVLYGMSAHRLSQELAIPYEEAQAFIERYFQSFPKVRAWIEKTLEEGRRRGYVETLFGRRRYVPDLEARVKSVREAAERMAFNMPVRGTAADLMKLAMVKLFPRLEEMGARMLLQVHDELVLEAPKERAEAVARLAKEVMEGVYPLAVPLEVEVGIGEDWLSAKE

SEQ ID NO: 41 - DNA, 28 bp, Artificial Sequence
  Description of Artificial Sequence:  Synthetic
cacgaattccgaggcgatgcttccgctc

SEQ ID NO: 42 - DNA, 30 bp, Artificial Sequence
  Description of Artificial Sequence:  Synthetic
tcgacgtcgactaacccttggcggaaagcc

SEQ ID NO: 43 - DNA, 23 bp, Artificial Sequence
  Description of Artificial Sequence:  Synthetic
gcatcgcctcggaattcatggtc

SEQ ID NO: 44 - DNA, 30 bp, Artificial Sequence
  Description of Artificial Sequence:  Synthetic
atagccatggtggagcggccgctctcccgg

SEQ ID NO: 45 - DNA, 33 bp, Artificial Sequence
  Description of Artificial Sequence:  Synthetic
aagcgtcgactcaatcctgcttcgcctccagcc

SEQ ID NO: 46 - DNA, 32 bp, Artificial Sequence
  Description of Artificial Sequence:  Synthetic
aatcgaattcaccccactttttgacctggagg

SEQ ID NO: 47 - DNA, 21 bp, Artificial Sequence
  Description of Artificial Sequence:  Synthetic
ccgggagagcggccgctccac

SEQ ID NO: 48 - DNA, 2508 bp, Artificial Sequence
  Description of Artificial Sequence:  Synthetic
atggaattcaccccactttttgacctggaggaaccccccaagcgggtgcttctggtggacggccaccacctggcctaccgcaccttctatgccctgagcctcaccacctcccggggggagccggtgcagatggtctacggcttcgcccggagcctcctcaaggccttgaaggaggacggacaggcggtggtcgtggtctttgacgccaaggccccctccttccgccacgaggcctacgaggcctacaaggcgggccgggcccccaccccggaggacttcccccgccagctcgccttggtcaagcggctggtggaccttctgggcctggtccgcctcgaggccccggggtacgaggcggacgacgtcctgggcaccctggccaagaaggccgaaagggaggggatggaggtgcgcatcctcacgggagaccgggacttcttccagctcctctccgagaaggtctcggtcctcctgccggacgggaccctggtcaccccaaaggacgtccaggagaagtacggggtgcccccggagcgctgggtggacttccgcgccctcacgggggaccgctcggacaacatccccggggtggcggggataggggagaagaccgcccttcgactcctcgcagagtgggggagcgtggaaaacctcctgaagaacctggaccgggtaaagccggactcgctccggcgcaagatagaggcgcacctcgaggacctccacctctccttagacctggcccgcatccgcaccgacctccccctggaggtggactttaaggccctgcgccgcaggacccccgacctggagggcctgagggcctttttggaggagctggagttcggaagcctcctccacgagttcggcctcctgggaggggagaagccccgggaggaggccccctggcccccgcccgaaggggccttcgtgggcttcctcctttcccgcaaggagcccatgtgggcggagcttctggccctggcggcggcctcggagggccgggtccaccgggcaacaagcccggttgaggccctggccgacctcaaggaggcccgggggttcctggccaaggacctggccgttttggccctgcgggagggggtggccctggaccccacggacgaccccctcctggtggcctacctcctggacccggccaacacccaccccgagggggtggcccggcgctacgggggcgagttcacggaggacgcagcggagagggccctcctctccgagaggctcttccagaacctctttccccggctttccgagaagctcctctggctctaccaggaggtggagcggcccctctcccgggtcttggcccacatggaggcccggggggtgaggctggacgtcccccttctggaggccctctcctttgagctggagaaggagatggagcgcctggagggggaggtcttccgtttggccggccaccccttcaacctcaactcccgcgaccagctggaaagggtcctctttgacgagctgggcctcaccccggtgggccggacggagaagacgggcaagcgctccaccgcccagggggccctggaggccctccggggggcccaccccatcgtggagctcatcctccagtaccgggagctttccaagctcaaaagcacctacctggaccccctgccccggctcgtccacccgcggacgggccggctccacacccgcttcaaccagacggccacggccacgggaaggctttccagctccgaccccaacctgcagaacatccccgtgcgcacccccttggggcagcgcatccgcaaggccttcgtggccgaggaggggtggctccttttggcggcggactactcccagattgagctccgggtcctggcccacctctcgggggacgagaacctgaagcgggtcttccgggaggggaaggacatccataccgagaccgccgcctggatgttcggcttagaccccgctctggtggatccaaagatgcgccgggcggccaagacggtcaacttcggcgtcctctacgggatgtccgcccacaggctctcccaggagctcggcatagactacaaggaggcggaggcctttattgagcgctacttccagagcttccccaaggtgcgggcctggatagaaaggaccctggaggagggccggacgcggggctacgtggagaccctgttcggcaggaggcgctatgtgcccgacctggcctcccgggtccgctcggtgcgggaggcggcggagcggatggccttcaacatgcccgtgcagggcaccgccgccgacctgatgaagatcgccatggtcaagctcttccccaggctaaagcccctgggggcccacctcctcctccaagtgcacgacgagctggtcctggaggtgcccgaggaccgggccgaggaggccaaggccctggtcaaggaggtcatggagaacgcctaccccctggacgtgcccctcgaggtggaggtgggcgtgggtcgggactggctggaggcgaagcaggattga

SEQ ID NO: 49 - DNA, 31 bp, Artificial Sequence
  Description of Artificial Sequence:  Synthetic
actggaattcctgcccctctttgagcccaag

SEQ ID NO: 50 - DNA, 30 bp, Artificial Sequence
  Description of Artificial Sequence:  Synthetic
aacagtcgacctaggccttggcggaaagcc

SEQ ID NO: 51 - DNA, 2499 bp, Artificial Sequence
  Description of Artificial Sequence:  Synthetic
atggaattcctgcccctctttgagcccaagggccgggtgcttctggtggacggccaccacctggcctaccgtaccttttttgccctgaagggcctcaccaccagccgcggggagccggtccaggcggtgtacgggtttgccaagagccttttgaaggcgctaagggaagacggggatgtggtgatcgtggtgtttgacgccaaggccccctccttccgccaccagacctacgaggcctacaaggcggggcgggctcccacccccgaggactttccccggcagcttgcccttatcaaggagatggtggaccttttgggcctggagcgcctcgaggtgccgggctttgaagcggatgacgtcctggctaccctggccaagaaggcggaaaaggaaggctacgaagtgcgcatcctcaccgcggaccgggacctttaccagcttctttcggagcgaatctccatccttcacccggagggttacctgatcaccccggagtggctttgggagaagtatgggcttaagccttcccagtgggtggactaccgggccttggccggggacccttccgacaacatccccggcgtgaagggcatcggggagaagacggcggccaagctgatccgggagtggggaagcctggaaaaccttcttaagcacctggaacaggtgaaacctgcctccgtgcgggagaagatccttagccacatggaggacctcaagctatccctggagctatcccgggtgcacacggacttgctccttcaggtggacttcgcccggcgccgggagccggaccgggaggggcttaaggcctttttggagaggctggagttcggaagcctcctccacgagttcggcctgttggaaagcccggtggcggcggaggaagctccctggccgccccccgagggagccttcgtggggtacgttctttcccgccccgagcccatgtgggcggagcttaacgccttggccgccgcctgggagggaagggtttaccgggcggaggatcccttggaggccttgcgggggcttggggaggtgagggggcttttggccaaggacctggcggtgctggccctgagggaagggattgccctggcaccgggcgacgaccccatgctcctcgcctacctcctggatccttccaacaccgcccccgaaggggtagcccggcgctacgggggggagtggaccgaggaggcgggggaaagggcgctgctttccgaaaggctttacgccgccctcctggagcggcttaagggggaggagaggcttctttggctttacgaggaggtggaaaagcccctttcgcgggtcctggcccacatggaggccacgggggtacggttggatgtggcctacttaaaggccctttccctggaggtggaggcggagataaggcgcttcgaggaggaggtccaccgcctggccgggcatcctttcaacctgaactcccgggaccagctggaaagggtcatctttgacgagcttgggcttcccgccatcggcaagacggagaagacgggcaagcgctccaccagcgccgccgttttggaggccttgcgggaggctcatcccatcgtggaccgcatccttcagtaccgggagctttccaagctcaagggaacctacatcgatcccttgcctgccctggtccaccccaagacgaaccgcctccacacccgtttcaaccagacggccaccgccacggggaggcttagcagctcggatcctaatctgcaaaatatccccgtgcgcacccctttgggccagcggatccgccgggccttcgtggccgaggaggggtggaggctggtggttttggactacagccagattgagctcagggtcctggcgcacctttccggggacgagaacctaatccgggtcttccaggagggccaggacatccacacccagacggccagctggatgttcggcgtgcccccagaggccgtggattccctgatgcgccgggcggccaagaccatcaacttcggcgtcctctacggcatgtccgcccaccggctttcgggagagctggccatcccctacgaggaggcggtggccttcatcgagcggtatttccagagctaccccaaggtgcgggcctggattgagaaaaccctggcggaaggacgggaacggggctatgtggaaaccctctttggccgccggcgctacgtgcccgacttggcttcccgggtgaagagcatccgggaggcagcggagcgcatggccttcaacatgccggtccaggggaccgccgcggatttgatgaaactggccatggtgaagctctttcccaggcttcaggagctgggggccaggatgcttttgcaggtgcacgacgaactggtcctcgaggctcccaaggagcaagcggaggaagtcgcccaggaggccaagcggaccatggaggaggtgtggcccctgaaggtgcccttggaggtggaagtgggcatcggggaggactggctttccgccaaggcctag

SEQ ID NO: 52 - DNA, 20 bp, Artificial Sequence
  Description of Artificial Sequence:  Synthetic
cgatctcctcggccacctcc

SEQ ID NO: 53 - DNA, 20 bp, Artificial Sequence
  Description of Artificial Sequence:  Synthetic
ggcggtgccctggacgggca

SEQ ID NO: 54 - DNA, 20 bp, Artificial Sequence
  Description of Artificial Sequence:  Synthetic
ccagctcgttgtggacctga

SEQ ID NO: 55 - DNA, 2505 bp, Thermus aquaticus
  CDS (1)..(2499)
atgaattcggggatgctgcccctctttgagcccaagggccgggtcctcctggtggacggccaccacctggcctaccgcaccttccacgccctgaagggcctcaccaccagccggggggagccggtgcaggcggtctacggcttcgccaagagcctcctcaaggccctcaaggaggacggggacgcggtgatcgtggtctttgacgccaaggccccctccttccgccacgaggcctacggggggtacaaggcgggccgggcccccacgccggaggactttccccggcaactcgccctcatcaaggagctggtggacctcctggggctggcgcgcctcgaggtcccgggctacgaggcggacgacgtcctggccagcctggccaagaaggcggaaaaggagggctacgaggtccgcatcctcaccgccgacaaagacctttaccagctcctttccgaccgcatccacgtcctccaccccgaggggtacctcatcaccccggcctggctttgggaaaagtacggcctgaggcccgaccagtgggccgactaccgggccctgaccggggacgagtccgacaaccttcccggggtcaagggcatcggggagaagacggcgaggaagcttctggaggagtgggggagcctggaagccctcctcaagaacctggaccggctgaagcccgccatccgggagaagatcctggcccacatggacgatctgaagctctcctgggacctggccaaggtgcgcaccgacctgcccctggaggtggacttcgccaaaaggcgggagcccgaccgggagaggcttagggcctttctggagaggcttgagtttggcagcctcctccacgagttcggccttctggaaagccccaaggccctggaggaggccccctggcccccgccggaaggggccttcgtgggctttgtgctttcccgcaaggagcccatgtgggccgatcttctggccctggccgccgccagggggggccgggtccaccgggcccccgagccttataaagccctcagggacctgaaggaggcgcgggggcttctcgccaaagacctgagcgttctggccctgagggaaggccttggcctcccgcccggcgacgaccccatgctcctcgcctacctcctggacccttccaacaccacccccgagggggtggcccggcgctacggcggggagtggacggaggaggcgggggagcgggccgccctttccgagaggctcttcgccaacctgtgggggaggcttgagggggaggagaggctcctttggctttaccgggaggtggagaggcccctttccgctgtcctggcccacatggaggccacgggggtgcgcctggacgtggcctatctcagggccttgtccctggaggtggccgaggagatcgcccgcctcgaggccgaggtcttccgcctggccggccaccccttcaacctcaactcccgggaccagctggaaagggtcctctttgacgagctagggcttcccgccatcggcaagacggagaagaccggcaagcgctccaccagcgccgccgtcctggaggccctccgcgaggcccaccccatcgtggagaagatcctgcagtaccgggagctcaccaagctgaagagcacctacattgaccccttgccggacctcatccaccccaggacgggccgcctccacacccgcttcaaccagacggccacggccacgggcaggctaagtagctccgatcccaacctccagaacatccccgtccgcaccccgcttgggcagaggatccgccgggccttcatcgccgaggaggggtggctattggtggccctggactatagccagatagagctcagggtgctggcccacctctccggcgacgagaacctgatccgggtcttccaggaggggcgggacatccacacggagaccgccagctggatgttcggcgtcccccgggaggccgtggaccccctgatgcgccgggcggccaagaccatcaacttcggggtcctctacggcatgtcggcccaccgcctctcccaggagctagccatcccttacgaggaggcccaggccttcattgagcgctactttcagagcttccccaaggtgcgggcctggattgagaagaccctggaggagggcaggaggcgggggtacgtggagaccctcttcggccgccgccgctacgtgccagacctagaggcccgggtgaagagcgtgcgggaggcggccgagcgcatggccttcaacatgcccgtccagggcaccgccgccgacctcatgaagctggctatggtgaagctcttccccaggctggaggaaatgggggccaggatgctccttcaggtccacaacgagctggtcctcgaggccccaaaagagagggcggaggccgtggcccggctggccaaggaggtcatggagggggtgtatcccctggccgtgcccctggaggtggaggtggggataggggaggactggctctccgccaaggagtgatag

SEQ ID NO: 56 - protein, 833 aa, Thermus aquaticus
MNSGMLPLFEPKGRVLLVDGHHLAYRTFHALKGLTTSRGEPVQAVYGFAKSLLKALKEDGDAVIVVFDAKAPSFRHEAYGGYKAGRAPTPEDFPRQLALIKELVDLLGLARLEVPGYEADDVLASLAKKAEKEGYEVRILTADKDLYQLLSDRIHVLHPEGYLITPAWLWEKYGLRPDQWADYRALTGDESDNLPGVKGIGEKTARKLLEEWGSLEALLKNLDRLKPAIREKILAHMDDLKLSWDLAKVRTDLPLEVDFAKRREPDRERLRAFLERLEFGSLLHEFGLLESPKALEEAPWPPPEGAFVGFVLSRKEPMWADLLALAAARGGRVHRAPEPYKALRDLKEARGLLAKDLSVLALREGLGLPPGDDPMLLAYLLDPSNTTPEGVARRYGGEWTEEAGERAALSERLFANLWGRLEGEERLLWLYREVERPLSAVLAHMEATGVRLDVAYLRALSLEVAEEIARLEAEVFRLAGHPFNLNSRDQLERVLFDELGLPAIGKTEKTGKRSTSAAVLEALREAHPIVEKILQYRELTKLKSTYIDPLPDLIHPRTGRLHTRFNQTATATGRLSSSDPNLQNIPVRTPLGQRIRRAFIAEEGWLLVALDYSQIELRVLAHLSGDENLIRVFQEGRDIHTETASWMFGVPREAVDPLMRRAAKTINFGVLYGMSAHRLSQELAIPYEEAQAFIERYFQSFPKVRAWIEKTLEEGRRRGYVETLFGRRRYVPDLEARVKSVREAAERMAFNMPVQGTAADLMKLAMVKLFPRLEEMGARMLLQVHNELVLEAPKERAEAVARLAKEVMEGVYPLAVPLEVEVGIGEDWLSAKE

SEQ ID NO: 57 - DNA, 26 bp, Artificial Sequence
  Description of Artificial Sequence:  Synthetic
caggaggagctcgttgtggacctgga

SEQ ID NO: 58 - protein, 836 aa, Artificial Sequence
  Description of Artificial Sequence:  Synthetic
MNSEAMLPLFEPKGRVLLVDGHHLAYRTFFALKGLTTSRGEPVQAVYGFAKSLLKALKEDGYKAVFVVFDAKAPSFRHEAYEAYKAGRAPTPEDFPRQLALIKELVDLLGFTRLEVPGYEADDVLATLAKKAEKEGYEVRILTADRDLYQLVSDRVAVLHPEGHLITPEWLWEKYGLRPEQWVDFRALVGDPSDNLPGVKGIGEKTALKLLKEWGSLENLLKNLDRVKPENVREKIKAHLEDLRLSLELSRVRTDLPLEVDLAQGREPDREGLRAFLERLEFGSLLHEFGLLEAPAPLEEAPWPPPEGAFVGFVLSRPEPMWAELKALAACRDGRVHRAADPLAGLKDLKEVRGLLAKDLAVLASREGLDLVPGDDPMLLAYLLDPSNTTPEGVARRYGGEWTEDAAHRALLSERLHRNLLKRLEGEEKLLWLYHEVEKPLSRVLAHMEATGVRRDVAYLQALSLELAEEIRRLEEEVFRLAGHPFNLNSRDQLERVLFDELRLPALGKTQKTGKRSTSAAVLEALREAHPIVEKILQHRELTKLKNTYVDPLPSLVHPRTGRLHTRFNQTATATGRLSSSDPNLQNIPVRTPLGQRIRRAFVAEAGWALVALDYSQIELRVLAHLSGDENLIRVFQEGKDIHTQTASWMFGVPPEAVDPLMRRAAKTVNFGVLYGMSAHRLSQELAIPYEEAVAFIERYFQSFPKVRAWIEKTLEEGRKRGYVETLFGRRRYVPDLNARVKSVREAAERMAFNMPVQGTAADLMKLAMVKLFPRLREMGARMLLQVHNELLLEAPQARAEEVAALAKEAMEKAYPLAVPLEVEVGMGEDWLSAKG

SEQ ID NO: 59 - DNA, 2511 bp, Artificial Sequence
  Description of Artificial Sequence:  Synthetic
atgaattccgaggcgatgcttccgctctttgaacccaaaggccgggtcctcctggtggacggccaccacctggcctaccgcaccttcttcgccctgaagggcctcaccacgagccggggcgaaccggtgcaggcggtctacggcttcgccaagagcctcctcaaggccctgaaggaggacgggtacaaggccgtcttcgtggtctttgacgccaaggccccctccttccgccacgaggcctacgaggcctacaaggcggggagggccccgacccccgaggacttcccccggcagctcgccctcatcaaggagctggtggacctcctggggtttacccgcctcgaggtccccggctacgaggcggacgacgttctcgccaccctggccaagaaggcggaaaaggaggggtacgaggtgcgcatcctcaccgccgaccgcgacctctaccaactcgtctccgaccgcgtcgccgtcctccaccccgagggccacctcatcaccccggagtggctttgggagaagtacggcctcaggccggagcagtgggtggacttccgcgccctcgtgggggacccctccgacaacctccccggggtcaagggcatcggggagaagaccgccctcaagctcctcaaggagtggggaagcctggaaaacctcctcaagaacctggaccgggtaaagccagaaaacgtccgggagaagatcaaggcccacctggaagacctcaggctctccttggagctctcccgggtgcgcaccgacctccccctggaggtggacctcgcccaggggcgggagcccgaccgggaggggcttagggccttcctggagaggctggagttcggcagcctcctccacgagttcggcctcctggaggcccccgcccccctggaggaggccccctggcccccgccggaaggggccttcgtgggcttcgtcctctcccgccccgagcccatgtgggcggagcttaaagccctggccgcctgcagggacggccgggtgcaccgggcagcagaccccttggcggggctaaaggacctcaaggaggtccggggcctcctcgccaaggacctcgccgtcttggcctcgagggaggggctagacctcgtgcccggggacgaccccatgctcctcgcctacctcctggacccctccaacaccacccccgagggggtggcgcggcgctacgggggggagtggacggaggacgccgcccaccgggccctcctctcggagaggctccatcggaacctccttaagcgcctcgagggggaggagaagctcctttggctctaccacgaggtggaaaagcccctctcccgggtcctggcccacatggaggccaccggggtacggcgggacgtggcctaccttcaggccctttccctggagcttgcggaggagatccgccgcctcgaggaggaggtcttccgcttggcgggccaccccttcaacctcaactcccgggaccagctggaaagggtgctctttgacgagcttaggcttcccgccttggggaagacgcaaaagacaggcaagcgctccaccagcgccgcggtgctggaggccctacgggaggcccaccccatcgtggagaagatcctccagcaccgggagctcaccaagctcaagaacacctacgtggaccccctcccaagcctcgtccacccgaggacgggccgcctccacacccgcttcaaccagacggccacggccacggggaggcttagtagctccgaccccaacctgcagaacatccccgtccgcacccccttgggccagaggatccgccgggccttcgtggccgaggcgggttgggcgttggtggccctggactatagccagatagagctccgcgtcctcgcccacctctccggggacgaaaacctgatcagggtcttccaggaggggaaggacatccacacccagaccgcaagctggatgttcggcgtccccccggaggccgtggaccccctgatgcgccgggcggccaagacggtgaacttcggcgtcctctacggcatgtccgcccataggctctcccaggagcttgccatcccctacgaggaggcggtggcctttatagagcgctacttccaaagcttccccaaggtgcgggcctggatagaaaagaccctggaggaggggaggaagcggggctacgtggaaaccctcttcggaagaaggcgctacgtgcccgacctcaacgcccgggtgaagagcgtcagggaggccgcggagcgcatggccttcaacatgcccgtccagggcaccgccgccgacctcatgaagctcgccatggtgaagctcttcccccgcctccgggagatgggggcccgcatgctcctccaggtccacaacgagctcctcctggaggccccccaagcgcgggccgaggaggtggcggctttggccaaggaggccatggagaaggcctatcccctcgccgtgcccctggaggtggaggtggggatgggggaggactggctttccgccaagggttag

SEQ ID NO: 60 - DNA, 50 bp, Artificial Sequence
  Description of Artificial Sequence:  Synthetic
tctagaggatctatcagtggtggtggtggtggtgctccttggcggagagc

SEQ ID NO: 61 - DNA, 58 bp, Artificial Sequence
  Description of Artificial Sequence:  Synthetic
tgcctgcaggtcgacgctagctagtggtggtggtggtggtgacccttggcggaaagcc

SEQ ID NO: 62 - DNA, 2517 bp, Artificial Sequence
  Description of Artificial Sequence:  Synthetic
atgaattcggggatgctgcccctctttgagcccaagggccgggtcctcctggtggacggccaccacctggcctaccgcaccttccacgccctgaagggcctcaccaccagccggggggagccggtgcaggcggtctacggcttcgccaagagcctcctcaaggccctcaaggaggacggggacgcggtgatcgtggtctttgacgccaaggccccctccttccgccacgaggcctacggggggtacaaggcgggccgggcccccacgccggaggactttccccggcaactcgccctcatcaaggagctggtggacctcctggggctggcgcgcctcgaggtcccgggctacgaggcggacgacgtcctggccagcctggccaagaaggcggaaaaggagggctacgaggtccgcatcctcaccgccgacaaagacctttaccagctcctttccgaccgcatccacgtcctccaccccgaggggtacctcatcaccccggcctggctttgggaaaagtacggcctgaggcccgaccagtgggccgactaccgggccctgaccggggacgagtccgacaaccttcccggggtcaagggcatcggggagaagacggcgaggaagcttctggaggagtgggggagcctggaagccctcctcaagaacctggaccggctgaagcccgccatccgggagaagatcctggcccacatggacgatctgaagctctcctgggacctggccaaggtgcgcaccgacctgcccctggaggtggacttcgccaaaaggcgggagcccgaccgggagaggcttagggcctttctggagaggcttgagtttggcagcctcctccacgagttcggccttctggaaagccccaaggccctggaggaggccccctggcccccgccggaaggggccttcgtgggctttgtgctttcccgcaaggagcccatgtgggccgatcttctggccctggccgccgccagggggggccgggtccaccgggcccccgagccttataaagccctcagggacctgaaggaggcgcgggggcttctcgccaaagacctgagcgttctggccctgagggaaggccttggcctcccgcccggcgacgaccccatgctcctcgcctacctcctggacccttccaacaccacccccgagggggtggcccggcgctacggcggggagtggacggaggaggcgggggagcgggccgccctttccgagaggctcttcgccaacctgtgggggaggcttgagggggaggagaggctcctttggctttaccgggaggtggagaggcccctttccgctgtcctggcccacatggaggccacgggggtgcgcctggacgtggcctatctcagggccttgtccctggaggtggccgaggagatcgcccgcctcgaggccgaggtcttccgcctggccggccaccccttcaacctcaactcccgggaccagctggaaagggtcctctttgacgagctagggcttcccgccatcggcaagacggagaagaccggcaagcgctccaccagcgccgccgtcctggaggccctccgcgaggcccaccccatcgtggagaagatcctgcagtaccgggagctcaccaagctgaagagcacctacattgaccccttgccggacctcatccaccccaggacgggccgcctccacacccgcttcaaccagacggccacggccacgggcaggctaagtagctccgatcccaacctccagaacatccccgtccgcaccccgcttgggcagaggatccgccgggccttcatcgccgaggaggggtggctattggtggccctggactatagccagatagagctcagggtgctggcccacctctccggcgacgagaacctgatccgggtcttccaggaggggcgggacatccacacggagaccgccagctggatgttcggcgtcccccgggaggccgtggaccccctgatgcgccgggcggccaagaccatcaacttcggggtcctctacggcatgtcggcccaccgcctctcccaggagctagccatcccttacgaggaggcccaggccttcattgagcgctactttcagagcttccccaaggtgcgggcctggattgagaagaccctggaggagggcaggaggcgggggtacgtggagaccctcttcggccgccgccgctacgtgccagacctagaggcccgggtgaagagcgtgcgggaggcggccgagcgcatggccttcaacatgcccgtccagggcaccgccgccgacctcatgaagctggctatggtgaagctcttccccaggctggaggaaatgggggccaggatgctccttcaggtccacaacgagctggtcctcgaggccccaaaagagagggcggaggccgtggcccggctggccaaggaggtcatggagggggtgtatcccctggccgtgcccctggaggtggaggtggggataggggaggactggctctccgccaaggagcaccaccaccaccaccac

SEQ ID NO: 63 - protein, 839 aa, Artificial Sequence
  Description of Artificial Sequence:  Synthetic
MNSGMLPLFEPKGRVLLVDGHHLAYRTFHALKGLTTSRGEPVQAVYGFAKSLLKALKEDGDAVIVVFDAKAPSFRHEAYGGYKAGRAPTPEDFPRQLALIKELVDLLGLARLEVPGYEADDVLASLAKKAEKEGYEVRILTADKDLYQLLSDRIHVLHPEGYLITPAWLWEKYGLRPDQWADYRALTGDESDNLPGVKGIGEKTARKLLEEWGSLEALLKNLDRLKPAIREKILAHMDDLKLSWDLAKVRTDLPLEVDFAKRREPDRERLRAFLERLEFGSLLHEFGLLESPKALEEAPWPPPEGAFVGFVLSRKEPMWADLLALAAARGGRVHRAPEPYKALRDLKEARGLLAKDLSVLALREGLGLPPGDDPMLLAYLLDPSNTTPEGVARRYGGEWTEEAGERAALSERLFANLWGRLEGEERLLWLYREVERPLSAVLAHMEATGVRLDVAYLRALSLEVAEEIARLEAEVFRLAGHPFNLNSRDQLERVLFDELGLPAIGKTEKTGKRSTSAAVLEALREAHPIVEKILQYRELTKLKSTYIDPLPDLIHPRTGRLHTRFNQTATATGRLSSSDPNLQNIPVRTPLGQRIRRAFIAEEGWLLVALDYSQIELRVLAHLSGDENLIRVFQEGRDIHTETASWMFGVPREAVDPLMRRAAKTINFGVLYGMSAHRLSQELAIPYEEAQAFIERYFQSFPKVRAWIEKTLEEGRRRGYVETLFGRRRYVPDLEARVKSVREAAERMAFNMPVQGTAADLMKLAMVKLFPRLEEMGARMLLQVHNELVLEAPKERAEAVARLAKEVMEGVYPLAVPLEVEVGIGEDWLSAKEHHHHHH

SEQ ID NO: 64 - DNA, 2526 bp, Artificial Sequence
  Description of Artificial Sequence:  Synthetic
atgaattccgaggcgatgcttccgctctttgaacccaaaggccgggtcctcctggtggacggccaccacctggcctaccgcaccttcttcgccctgaagggcctcaccacgagccggggcgaaccggtgcaggcggtctacggcttcgccaagagcctcctcaaggccctgaaggaggacgggtacaaggccgtcttcgtggtctttgacgccaaggccccctccttccgccacgaggcctacgaggcctacaaggcggggagggccccgacccccgaggacttcccccggcagctcgccctcatcaaggagctggtggacctcctggggtttacccgcctcgaggtccccggctacgaggcggacgacgttctcgccaccctggccaagaaggcggaaaaggaggggtacgaggtgcgcatcctcaccgccgaccgcgacctctaccaactcgtctccgaccgcgtcgccgtcctccaccccgagggccacctcatcaccccggagtggctttgggagaagtacggcctcaggccggagcagtgggtggacttccgcgccctcgtgggggacccctccgacaacctccccggggtcaagggcatcggggagaagaccgccctcaagctcctcaaggagtggggaagcctggaaaacctcctcaagaacctggaccgggtaaagccagaaaacgtccgggagaagatcaaggcccacctggaagacctcaggctctccttggagctctcccgggtgcgcaccgacctccccctggaggtggacctcgcccaggggcgggagcccgaccgggaggggcttagggccttcctggagaggctggagttcggcagcctcctccacgagttcggcctcctggaggcccccgcccccctggaggaggccccctggcccccgccggaaggggccttcgtgggcttcgtcctctcccgccccgagcccatgtgggcggagcttaaagccctggccgcctgcagggacggccgggtgcaccgggcagcagaccccttggcggggctaaaggacctcaaggaggtccggggcctcctcgccaaggacctcgccgtcttggcctcgagggaggggctagacctcgtgcccggggacgaccccatgctcctcgcctacctcctggacccctccaacaccacccccgagggggtggcgcggcgctacgggggggagtggacggaggacgccgcccaccgggccctcctctcggagaggctccatcggaacctccttaagcgcctcgagggggaggagaagctcctttggctctaccacgaggtggaaaagcccctctcccgggtcctggcccacatggaggccaccggggtacggcgggacgtggcctaccttcaggccctttccctggagcttgcggaggagatccgccgcctcgaggaggaggtcttccgcttggcgggccaccccttcaacctcaactcccgggaccagctggaaagggtgctctttgacgagcttaggcttcccgccttggggaagacgcaaaagacaggcaagcgctccaccagcgccgcggtgctggaggccctacgggaggcccaccccatcgtggagaagatcctccagcaccgggagctcaccaagctcaagaacacctacgtggaccccctcccaagcctcgtccacccgaggacgggccgcctccacacccgcttcaaccagacggccacggccacggggaggcttagtagctccgaccccaacctgcagaacatccccgtccgcacccccttgggccagaggatccgccgggccttcgtggccgaggcgggttgggcgttggtggccctggactatagccagatagagctccgcgtcctcgcccacctctccggggacgaaaacctgatcagggtcttccaggaggggaaggacatccacacccagaccgcaagctggatgttcggcgtccccccggaggccgtggaccccctgatgcgccgggcggccaagacggtgaacttcggcgtcctctacggcatgtccgcccataggctctcccaggagcttgccatcccctacgaggaggcggtggcctttatagagcgctacttccaaagcttccccaaggtgcgggcctggatagaaaagaccctggaggaggggaggaagcggggctacgtggaaaccctcttcggaagaaggcgctacgtgcccgacctcaacgcccgggtgaagagcgtcagggaggccgcggagcgcatggccttcaacatgcccgtccagggcaccgccgccgacctcatgaagctcgccatggtgaagctcttcccccgcctccgggagatgggggcccgcatgctcctccaggtccacaacgagctcctcctggaggccccccaagcgcgggccgaggaggtggcggctttggccaaggaggccatggagaaggcctatcccctcgccgtgcccctggaggtggaggtggggatgggggaggactggctttccgccaagggtcaccaccaccaccaccac

SEQ ID NO: 65 - protein, 842 aa, Artificial Sequence
  Description of Artificial Sequence:  Synthetic
MNSEAMLPLFEPKGRVLLVDGHHLAYRTFFALKGLTTSRGEPVQAVYGFAKSLLKALKEDGYKAVFVVFDAKAPSFRHEAYEAYKAGRAPTPEDFPRQLALIKELVDLLGFTRLEVPGYEADDVLATLAKKAEKEGYEVRILTADRDLYQLVSDRVAVLHPEGHLITPEWLWEKYGLRPEQWVDFRALVGDPSDNLPGVKGIGEKTALKLLKEWGSLENLLKNLDRVKPENVREKIKAHLEDLRLSLELSRVRTDLPLEVDLAQGREPDREGLRAFLERLEFGSLLHEFGLLEAPAPLEEAPWPPPEGAFVGFVLSRPEPMWAELKALAACRDGRVHRAADPLAGLKDLKEVRGLLAKDLAVLASREGLDLVPGDDPMLLAYLLDPSNTTPEGVARRYGGEWTEDAAHRALLSERLHRNLLKRLEGEEKLLWLYHEVEKPLSRVLAHMEATGVRRDVAYLQALSLELAEEIRRLEEEVFRLAGHPFNLNSRDQLERVLFDELRLPALGKTQKTGKRSTSAAVLEALREAHPIVEKILQHRELTKLKNTYVDPLPSLVHPRTGRLHTRFNQTATATGRLSSSDPNLQNIPVRTPLGQRIRRAFVAEAGWALVALDYSQIELRVLAHLSGDENLIRVFQEGKDIHTQTASWMFGVPPEAVDPLMRRAAKTVNFGVLYGMSAHRLSQELAIPYEEAVAFIERYFQSFPKVRAWIEKTLEEGRKRGYVETLFGRRRYVPDLNARVKSVREAAERMAFNMPVQGTAADLMKLAMVKLFPRLREMGARMLLQVHNELLLEAPQARAEEVAALAKEAMEKAYPLAVPLEVEVGMGEDWLSAKGHHHHHH

SEQ ID NO: 66 - DNA, 30 bp, Artificial Sequence
  Description of Artificial Sequence:  Synthetic
gccgccaggggcggccgcgtccaccgggcc

SEQ ID NO: 67 - DNA, 31 bp, Artificial Sequence
  Description of Artificial Sequence:  Synthetic
gcctgcaggggcggccgcgtgcaccggggca

SEQ ID NO: 68 - DNA, 26 bp, Artificial Sequence
  Description of Artificial Sequence:  Synthetic
ctcctggacccttcgaacaccacccc

SEQ ID NO: 69 - DNA, 23 bp, Artificial Sequence
  Description of Artificial Sequence:  Synthetic
gtcctggcccatatggaggccac

SEQ ID NO: 70 - DNA, 2526 bp, Artificial Sequence
  Description of Artificial Sequence:  Synthetic
atgaattccgaggcgatgcttccgctctttgaacccaaaggccgggtcctcctggtggacggccaccacctggcctaccgcaccttcttcgccctgaagggcctcaccacgagccggggcgaaccggtgcaggcggtctacggcttcgccaagagcctcctcaaggccctgaaggaggacgggtacaaggccgtcttcgtggtctttgacgccaaggccccctccttccgccacgaggcctacgaggcctacaaggcggggagggccccgacccccgaggacttcccccggcagctcgccctcatcaaggagctggtggacctcctggggtttacccgcctcgaggtccccggctacgaggcggacgacgttctcgccaccctggccaagaaggcggaaaaggaggggtacgaggtgcgcatcctcaccgccgaccgcgacctctaccaactcgtctccgaccgcgtcgccgtcctccaccccgagggccacctcatcaccccggagtggctttgggagaagtacggcctcaggccggagcagtgggtggacttccgcgccctcgtgggggacccctccgacaacctccccggggtcaagggcatcggggagaagaccgccctcaagctcctcaaggagtggggaagcctggaaaacctcctcaagaacctggaccgggtaaagccagaaaacgtccgggagaagatcaaggcccacctggaagacctcaggctctccttggagctctcccgggtgcgcaccgacctccccctggaggtggacctcgcccaggggcgggagcccgaccgggaggggcttagggccttcctggagaggctggagttcggcagcctcctccacgagttcggcctcctggaggcccccgcccccctggaggaggccccctggcccccgccggaaggggccttcgtgggcttcgtcctctcccgccccgagcccatgtgggcggagcttaaagccctggccgcctgcaggggcggccgcgtgcaccgggcagcagaccccttggcggggctaaaggacctcaaggaggtccggggcctcctcgccaaggacctcgccgtcttggcctcgagggaggggctagacctcgtgcccggggacgaccccatgctcctcgcctacctcctggacccttcgaacaccacccccgagggggtggcgcggcgctacgggggggagtggacggaggacgccgcccaccgggccctcctctcggagaggctccatcggaacctccttaagcgcctcgagggggaggagaagctcctttggctctaccacgaggtggaaaagcccctctcccgggtcctggcccatatggaggccaccggggtacggcgggacgtggcctaccttcaggccctttccctggagcttgcggaggagatccgccgcctcgaggaggaggtcttccgcttggcgggccaccccttcaacctcaactcccgggaccagctggaaagggtgctctttgacgagcttaggcttcccgccttggggaagacgcaaaagacaggcaagcgctccaccagcgccgcggtgctggaggccctacgggaggcccaccccatcgtggagaagatcctccagcaccgggagctcaccaagctcaagaacacctacgtggaccccctcccaagcctcgtccacccgaggacgggccgcctccacacccgcttcaaccagacggccacggccacggggaggcttagtagctccgaccccaacctgcagaacatccccgtccgcacccccttgggccagaggatccgccgggccttcgtggccgaggcgggttgggcgttggtggccctggactatagccagatagagctccgcgtcctcgcccacctctccggggacgaaaacctgatcagggtcttccaggaggggaaggacatccacacccagaccgcaagctggatgttcggcgtccccccggaggccgtggaccccctgatgcgccgggcggccaagacggtgaacttcggcgtcctctacggcatgtccgcccataggctctcccaggagcttgccatcccctacgaggaggcggtggcctttatagagcgctacttccaaagcttccccaaggtgcgggcctggatagaaaagaccctggaggaggggaggaagcggggctacgtggaaaccctcttcggaagaaggcgctacgtgcccgacctcaacgcccgggtgaagagcgtcagggaggccgcggagcgcatggccttcaacatgcccgtccagggcaccgccgccgacctcatgaagctcgccatggtgaagctcttcccccgcctccgggagatgggggcccgcatgctcctccaggtccacaacgagctcctcctggaggccccccaagcgcgggccgaggaggtggcggctttggccaaggaggccatggagaaggcctatcccctcgccgtgcccctggaggtggaggtggggatgggggaggactggctttccgccaagggtcaccaccaccaccaccac

SEQ ID NO: 71 - DNA, 2517 bp, Artificial Sequence
  Description of Artificial Sequence:  Synthetic
atgaattcggggatgctgcccctctttgagcccaagggccgggtcctcctggtggacggccaccacctggcctaccgcaccttccacgccctgaagggcctcaccaccagccggggggagccggtgcaggcggtctacggcttcgccaagagcctcctcaaggccctcaaggaggacggggacgcggtgatcgtggtctttgacgccaaggccccctccttccgccacgaggcctacggggggtacaaggcgggccgggcccccacgccggaggactttccccggcaactcgccctcatcaaggagctggtggacctcctggggctggcgcgcctcgaggtcccgggctacgaggcggacgacgtcctggccagcctggccaagaaggcggaaaaggagggctacgaggtccgcatcctcaccgccgacaaagacctttaccagctcctttccgaccgcatccacgtcctccaccccgaggggtacctcatcaccccggcctggctttgggaaaagtacggcctgaggcccgaccagtgggccgactaccgggccctgaccggggacgagtccgacaaccttcccggggtcaagggcatcggggagaagacggcgaggaagcttctggaggagtgggggagcctggaagccctcctcaagaacctggaccggctgaagcccgccatccgggagaagatcctggcccacatggacgatctgaagctctcctgggacctggccaaggtgcgcaccgacctgcccctggaggtggacttcgccaaaaggcgggagcccgaccgggagaggcttagggcctttctggagaggcttgagtttggcagcctcctccacgagttcggccttctggaaagccccaaggccctggaggaggccccctggcccccgccggaaggggccttcgtgggctttgtgctttcccgcaaggagcccatgtgggccgatcttctggccctggccgccgccaggggcggccgcgtccaccgggcccccgagccttataaagccctcagggacctgaaggaggcgcgggggcttctcgccaaagacctgagcgttctggccctgagggaaggccttggcctcccgcccggcgacgaccccatgctcctcgcctacctcctggacccttcgaacaccacccccgagggggtggcccggcgctacggcggggagtggacggaggaggcgggggagcgggccgccctttccgagaggctcttcgccaacctgtgggggaggcttgagggggaggagaggctcctttggctttaccgggaggtggagaggcccctttccgctgtcctggcccatatggaggccacgggggtgcgcctggacgtggcctatctcagggccttgtccctggaggtggccgaggagatcgcccgcctcgaggccgaggtcttccgcctggccggccaccccttcaacctcaactcccgggaccagctggaaagggtcctctttgacgagctagggcttcccgccatcggcaagacggagaagaccggcaagcgctccaccagcgccgccgtcctggaggccctccgcgaggcccaccccatcgtggagaagatcctgcagtaccgggagctcaccaagctgaagagcacctacattgaccccttgccggacctcatccaccccaggacgggccgcctccacacccgcttcaaccagacggccacggccacgggcaggctaagtagctccgatcccaacctccagaacatccccgtccgcaccccgcttgggcagaggatccgccgggccttcatcgccgaggaggggtggctattggtggccctggactatagccagatagagctcagggtgctggcccacctctccggcgacgagaacctgatccgggtcttccaggaggggcgggacatccacacggagaccgccagctggatgttcggcgtcccccgggaggccgtggaccccctgatgcgccgggcggccaagaccatcaacttcggggtcctctacggcatgtcggcccaccgcctctcccaggagctagccatcccttacgaggaggcccaggccttcattgagcgctactttcagagcttccccaaggtgcgggcctggattgagaagaccctggaggagggcaggaggcgggggtacgtggagaccctcttcggccgccgccgctacgtgccagacctagaggcccgggtgaagagcgtgcgggaggcggccgagcgcatggccttcaacatgcccgtccagggcaccgccgccgacctcatgaagctggctatggtgaagctcttccccaggctggaggaaatgggggccaggatgctccttcaggtccacaacgagctggtcctcgaggccccaaaagagagggcggaggccgtggcccggctggccaaggaggtcatggagggggtgtatcccctggccgtgcccctggaggtggaggtggggataggggaggactggctctccgccaaggagcaccaccaccaccaccac

SEQ ID NO: 72 - protein, 842 aa, Artificial Sequence
  Description of Artificial Sequence:  Synthetic
MNSEAMLPLFEPKGRVLLVDGHHLAYRTFFALKGLTTSRGEPVQAVYGFAKSLLKALKEDGYKAVFVVFDAKAPSFRHEAYEAYKAGRAPTPEDFPRQLALIKELVDLLGFTRLEVPGYEADDVLATLAKKAEKEGYEVRILTADRDLYQLVSDRVAVLHPEGHLITPEWLWEKYGLRPEQWVDFRALVGDPSDNLPGVKGIGEKTALKLLKEWGSLENLLKNLDRVKPENVREKIKAHLEDLRLSLELSRVRTDLPLEVDLAQGREPDREGLRAFLERLEFGSLLHEFGLLEAPAPLEEAPWPPPEGAFVGFVLSRPEPMWAELKALAACRGGRVHRAADPLAGLKDLKEVRGLLAKDLAVLASREGLDLVPGDDPMLLAYLLDPSNTTPEGVARRYGGEWTEDAAHRALLSERLHRNLLKRLEGEEKLLWLYHEVEKPLSRVLAHMEATGVRRDVAYLQALSLELAEEIRRLEEEVFRLAGHPFNLNSRDQLERVLFDELRLPALGKTQKTGKRSTSAAVLEALREAHPIVEKILQHRELTKLKNTYVDPLPSLVHPRTGRLHTRFNQTATATGRLSSSDPNLQNIPVRTPLGQRIRRAFVAEAGWALVALDYSQIELRVLAHLSGDENLIRVFQEGKDIHTQTASWMFGVPPEAVDPLMRRAAKTVNFGVLYGMSAHRLSQELAIPYEEAVAFIERYFQSFPKVRAWIEKTLEEGRKRGYVETLFGRRRYVPDLNARVKSVREAAERMAFNMPVQGTAADLMKLAMVKLFPRLREMGARMLLQVHNELLLEAPQARAEEVAALAKEAMEKAYPLAVPLEVEVGMGEDWLSAKGHHHHHH

SEQ ID NO: 73 - protein, 839 aa, Artificial Sequence; identical to SEQ ID NO: 63
  Description of Artificial Sequence:  Synthetic

SEQ ID NO: 74 - DNA, 2517 bp, Artificial Sequence
  Description of Artificial Sequence:  Synthetic
atgaattcggggatgctgcccctctttgagcccaagggccgggtcctcctggtggacggccaccacctggcctaccgcaccttccacgccctgaagggcctcaccaccagccggggggagccggtgcaggcggtctacggcttcgccaagagcctcctcaaggccctcaaggaggacggggacgcggtgatcgtggtctttgacgccaaggccccctccttccgccacgaggcctacggggggtacaaggcgggccgggcccccacgccggaggactttccccggcaactcgccctcatcaaggagctggtggacctcctggggctggcgcgcctcgaggtcccgggctacgaggcggacgacgtcctggccagcctggccaagaaggcggaaaaggagggctacgaggtccgcatcctcaccgccgacaaagacctttaccagctcctttccgaccgcatccacgtcctccaccccgaggggtacctcatcaccccggcctggctttgggaaaagtacggcctgaggcccgaccagtgggccgactaccgggccctgaccggggacgagtccgacaaccttcccggggtcaagggcatcggggagaagacggcgaggaagcttctggaggagtgggggagcctggaagccctcctcaagaacctggaccggctgaagcccgccatccgggagaagatcctggcccacatggacgatctgaagctctcctgggacctggccaaggtgcgcaccgacctgcccctggaggtggacttcgccaaaaggcgggagcccgaccgggagaggcttagggcctttctggagaggcttgagtttggcagcctcctccacgagttcggccttctggaaagccccaaggccctggaggaggccccctggcccccgccggaaggggccttcgtgggctttgtgctttcccgcaaggagcccatgtgggccgatcttctggccctggccgccgccaggggcggccgcgtgcaccgggcagcagaccccttggcggggctaaaggacctcaaggaggtccggggcctcctcgccaaggacctcgccgtcttggcctcgagggaggggctagacctcgtgcccggggacgaccccatgctcctcgcctacctcctggacccttcgaacaccacccccgagggggtggcgcggcgctacgggggggagtggacggaggacgccgcccaccgggccctcctctcggagaggctccatcggaacctccttaagcgcctcgagggggaggagaagctcctttggctctaccacgaggtggaaaagcccctctcccgggtcctggcccatatggaggccaccggggtacggcgggacgtggcctaccttcaggccctttccctggagcttgcggaggagatccgccgcctcgaggaggaggtcttccgcttggcgggccaccccttcaacctcaactcccgggaccagctggaaagggtgctctttgacgagcttaggcttcccgccttggggaagacgcaaaagacaggcaagcgctccaccagcgccgcggtgctggaggccctacgggaggcccaccccatcgtggagaagatcctccagcaccgggagctcaccaagctcaagaacacctacgtggaccccctcccaagcctcgtccacccgaggacgggccgcctccacacccgcttcaaccagacggccacggccacggggaggcttagtagctccgaccccaacctgcagaacatccccgtccgcacccccttgggccagaggatccgccgggccttcgtggccgaggcgggttgggcgttggtggccctggactatagccagatagagctccgcgtcctcgcccacctctccggggacgaaaacctgatcagggtcttccaggaggggaaggacatccacacccagaccgcaagctggatgttcggcgtccccccggaggccgtggaccccctgatgcgccgggcggccaagacggtgaacttcggcgtcctctacggcatgtccgcccataggctctcccaggagcttgccatcccctacgaggaggcggtggcctttatagagcgctacttccaaagcttccccaaggtgcgggcctggatagaaaagaccctggaggaggggaggaagcggggctacgtggaaaccctcttcggaagaaggcgctacgtgcccgacctcaacgcccgggtgaagagcgtcagggaggccgcggagcgcatggccttcaacatgcccgtccagggcaccgccgccgacctcatgaagctcgccatggtgaagctcttcccccgcctccgggagatgggggcccgcatgctcctccaggtccacaacgagctcctcctggaggccccccaagcgcgggccgaggaggtggcggctttggccaaggaggccatggagaaggcctatcccctcgccgtgcccctggaggtggaggtggggatgggggaggactggctttccgccaagggtcaccaccaccaccaccac

SEQ ID NO: 75 - protein, 839 aa, Artificial Sequence
  Description of Artificial Sequence:  Synthetic
MNSGMLPLFEPKGRVLLVDGHHLAYRTFHALKGLTTSRGEPVQAVYGFAKSLLKALKEDGDAVIVVFDAKAPSFRHEAYGGYKAGRAPTPEDFPRQLALIKELVDLLGLARLEVPGYEADDVLASLAKKAEKEGYEVRILTADKDLYQLLSDRIHVLHPEGYLITPAWLWEKYGLRPDQWADYRALTGDESDNLPGVKGIGEKTARKLLEEWGSLEALLKNLDRLKPAIREKILAHMDDLKLSWDLAKVRTDLPLEVDFAKRREPDRERLRAFLERLEFGSLLHEFGLLESPKALEEAPWPPPEGAFVGFVLSRKEPMWADLLALAAARGGRVHRAADPLAGLKDLKEVRGLLAKDLAVLASREGLDLVPGDDPMLLAYLLDPSNTTPEGVARRYGGEWTEDAAHRALLSERLHRNLLKRLEGEEKLLWLYHEVEKPLSRVLAHMEATGVRRDVAYLQALSLELAEEIRRLEEEVFRLAGHPFNLNSRDQLERVLFDELRLPALGKTQKTGKRSTSAAVLEALREAHPIVEKILQHRELTKLKNTYVDPLPSLVHPRTGRLHTRFNQTATATGRLSSSDPNLQNIPVRTPLGQRIRRAFVAEAGWALVALDYSQIELRVLAHLSGDENLIRVFQEGKDIHTQTASWMFGVPPEAVDPLMRRAAKTVNFGVLYGMSAHRLSQELAIPYEEAVAFIERYFQSFPKVRAWIEKTLEEGRKRGYVETLFGRRRYVPDLNARVKSVREAAERMAFNMPVQGTAADLMKLAMVKLFPRLREMGARMLLQVHNELLLEAPQARAEEVAALAKEAMEKAYPLAVPLEVEVGMGEDWLSAKGHHHHHH

SEQ ID NO: 76 - DNA, 2526 bp, Artificial Sequence
  Description of Artificial Sequence:  Synthetic
atgaattccgaggcgatgcttccgctctttgaacccaaaggccgggtcctcctggtggacggccaccacctggcctaccgcaccttcttcgccctgaagggcctcaccacgagccggggcgaaccggtgcaggcggtctacggcttcgccaagagcctcctcaaggccctgaaggaggacgggtacaaggccgtcttcgtggtctttgacgccaaggccccctccttccgccacgaggcctacgaggcctacaaggcggggagggccccgacccccgaggacttcccccggcagctcgccctcatcaaggagctggtggacctcctggggtttacccgcctcgaggtccccggctacgaggcggacgacgttctcgccaccctggccaagaaggcggaaaaggaggggtacgaggtgcgcatcctcaccgccgaccgcgacctctaccaactcgtctccgaccgcgtcgccgtcctccaccccgagggccacctcatcaccccggagtggctttgggagaagtacggcctcaggccggagcagtgggtggacttccgcgccctcgtgggggacccctccgacaacctccccggggtcaagggcatcggggagaagaccgccctcaagctcctcaaggagtggggaagcctggaaaacctcctcaagaacctggaccgggtaaagccagaaaacgtccgggagaagatcaaggcccacctggaagacctcaggctctccttggagctctcccgggtgcgcaccgacctccccctggaggtggacctcgcccaggggcgggagcccgaccgggaggggcttagggccttcctggagaggctggagttcggcagcctcctccacgagttcggcctcctggaggcccccgcccccctggaggaggccccctggcccccgccggaaggggccttcgtgggcttcgtcctctcccgccccgagcccatgtgggcggagcttaaagccctggccgcctgcaggggcggccgcgtccaccgggcccccgagccttataaagccctcagggacctgaaggaggcgcgggggcttctcgccaaagacctgagcgttctggccctgagggaaggccttggcctcccgcccggcgacgaccccatgctcctcgcctacctcctggacccttcgaacaccacccccgagggggtggcccggcgctacggcggggagtggacggaggaggcgggggagcgggccgccctttccgagaggctcttcgccaacctgtgggggaggcttgagggggaggagaggctcctttggctttaccgggaggtggagaggcccctttccgctgtcctggcccatatggaggccacgggggtgcgcctggacgtggcctatctcagggccttgtccctggaggtggccgaggagatcgcccgcctcgaggccgaggtcttccgcctggccggccaccccttcaacctcaactcccgggaccagctggaaagggtcctctttgacgagctagggcttcccgccatcggcaagacggagaagaccggcaagcgctccaccagcgccgccgtcctggaggccctccgcgaggcccaccccatcgtggagaagatcctgcagtaccgggagctcaccaagctgaagagcacctacattgaccccttgccggacctcatccaccccaggacgggccgcctccacacccgcttcaaccagacggccacggccacgggcaggctaagtagctccgatcccaacctccagaacatccccgtccgcaccccgcttgggcagaggatccgccgggccttcatcgccgaggaggggtggctattggtggccctggactatagccagatagagctcagggtgctggcccacctctccggcgacgagaacctgatccgggtcttccaggaggggcgggacatccacacggagaccgccagctggatgttcggcgtcccccgggaggccgtggaccccctgatgcgccgggcggccaagaccatcaacttcggggtcctctacggcatgtcggcccaccgcctctcccaggagctagccatcccttacgaggaggcccaggccttcattgagcgctactttcagagcttccccaaggtgcgggcctggattgagaagaccctggaggagggcaggaggcgggggtacgtggagaccctcttcggccgccgccgctacgtgccagacctagaggcccgggtgaagagcgtgcgggaggcggccgagcgcatggccttcaacatgcccgtccagggcaccgccgccgacctcatgaagctggctatggtgaagctcttccccaggctggaggaaatgggggccaggatgctccttcaggtccacaacgagctggtcctcgaggccccaaaagagagggcggaggccgtggcccggctggccaaggaggtcatggagggggtgtatcccctggccgtgcccctggaggtggaggtggggataggggaggactggctctccgccaaggagcaccaccaccaccaccac

SEQ ID NO: 77 - protein, 842 aa, Artificial Sequence
  Description of Artificial Sequence:  Synthetic
MNSEAMLPLFEPKGRVLLVDGHHLAYRTFFALKGLTTSRGEPVQAVYGFAKSLLKALKEDGYKAVFVVFDAKAPSFRHEAYEAYKAGRAPTPEDFPRQLALIKELVDLLGFTRLEVPGYEADDVLATLAKKAEKEGYEVRILTADRDLYQLVSDRVAVLHPEGHLITPEWLWEKYGLRPEQWVDFRALVGDPSDNLPGVKGIGEKTALKLLKEWGSLENLLKNLDRVKPENVREKIKAHLEDLRLSLELSRVRTDLPLEVDLAQGREPDREGLRAFLERLEFGSLLHEFGLLEAPAPLEEAPWPPPEGAFVGFVLSRPEPMWAELKALAACRGGRVHRAPEPYKALRDLKEARGLLAKDLSVLALREGLGLPPGDDPMLLAYLLDPSNTTPEGVARRYGGEWTEEAGERAALSERLFANLWGRLEGEERLLWLYREVERPLSAVLAHMEATGVRLDVAYLRALSLEVAEEIARLEAEVFRLAGHPFNLNSRDQLERVLFDELGLPAIGKTEKTGKRSTSAAVLEALREAHPIVEKILQYRELTKLKSTYIDPLPDLIHPRTGRLHTRFNQTATATGRLSSSDPNLQNIPVRTPLGQRIRRAFIAEEGWLLVALDYSQIELRVLAHLSGDENLIRVFQEGRDIHTETASWMFGVPREAVDPLMRRAAKTINFGVLYGMSAHRLSQELAIPYEEAQAFIERYFQSFPKVRAWIEKTLEEGRRRGYVETLFGRRRYVPDLEARVKSVREAAERMAFNMPVQGTAADLMKLAMVKLFPRLEEMGARMLLQVHNELVLEAPKERAEAVARLAKEVMEGVYPLAVPLEVEVGIGEDWLSAKEHHHHHH

SEQ ID NO: 78 - DNA, 2517 bp, Artificial Sequence
  Description of Artificial Sequence:  Synthetic
atgaattcggggatgctgcccctctttgagcccaagggccgggtcctcctggtggacggccaccacctggcctaccgcaccttccacgccctgaagggcctcaccaccagccggggggagccggtgcaggcggtctacggcttcgccaagagcctcctcaaggccctcaaggaggacggggacgcggtgatcgtggtctttgacgccaaggccccctccttccgccacgaggcctacggggggtacaaggcgggccgggcccccacgccggaggactttccccggcaactcgccctcatcaaggagctggtggacctcctggggctggcgcgcctcgaggtcccgggctacgaggcggacgacgtcctggccagcctggccaagaaggcggaaaaggagggctacgaggtccgcatcctcaccgccgacaaagacctttaccagctcctttccgaccgcatccacgtcctccaccccgaggggtacctcatcaccccggcctggctttgggaaaagtacggcctgaggcccgaccagtgggccgactaccgggccctgaccggggacgagtccgacaaccttcccggggtcaagggcatcggggagaagacggcgaggaagcttctggaggagtgggggagcctggaagccctcctcaagaacctggaccggctgaagcccgccatccgggagaagatcctggcccacatggacgatctgaagctctcctgggacctggccaaggtgcgcaccgacctgcccctggaggtggacttcgccaaaaggcgggagcccgaccgggagaggcttagggcctttctggagaggcttgagtttggcagcctcctccacgagttcggccttctggaaagccccaaggccctggaggaggccccctggcccccgccggaaggggccttcgtgggctttgtgctttcccgcaaggagcccatgtgggccgatcttctggccctggccgccgccaggggcggccgcgtgcaccgggcagcagaccccttggcggggctaaaggacctcaaggaggtccggggcctcctcgccaaggacctcgccgtcttggcctcgagggaggggctagacctcgtgcccggggacgaccccatgctcctcgcctacctcctggacccttcgaacaccacccccgagggggtggcgcggcgctacgggggggagtggacggaggacgccgcccaccgggccctcctctcggagaggctccatcggaacctccttaagcgcctcgagggggaggagaagctcctttggctctaccacgaggtggaaaagcccctctcccgggtcctggcccatatggaggccaccggggtacggcgggacgtggcctaccttcaggccctttccctggagcttgcggaggagatccgccgcctcgaggaggaggtcttccgcttggcgggccaccccttcaacctcaactcccgggaccagctggaaagggtgctctttgacgagcttaggcttcccgccttggggaagacgcaaaagacaggcaagcgctccaccagcgccgcggtgctggaggccctacgggaggcccaccccatcgtggagaagatcctccagcaccgggagctcaccaagctcaagaacacctacgtggaccccctcccaagcctcgtccacccgaggacgggccgcctccacacccgcttcaaccagacggccacggccacggggaggcttagtagctccgaccccaacctgcagaacatccccgtccgcacccccttgggccagaggatccgccgggccttcatcgccgaggaggggtggctattggtggccctggactatagccagatagagctcagggtgctggcccacctctccggcgacgagaacctgatccgggtcttccaggaggggcgggacatccacacggagaccgccagctggatgttcggcgtcccccgggaggccgtggaccccctgatgcgccgggcggccaagaccatcaacttcggggtcctctacggcatgtcggcccaccgcctctcccaggagctagccatcccttacgaggaggcccaggccttcattgagcgctactttcagagcttccccaaggtgcgggcctggattgagaagaccctggaggagggcaggaggcgggggtacgtggagaccctcttcggccgccgccgctacgtgccagacctagaggcccgggtgaagagcgtgcgggaggcggccgagcgcatggccttcaacatgcccgtccagggcaccgccgccgacctcatgaagctggctatggtgaagctcttccccaggctggaggaaatgggggccaggatgctccttcaggtccacaacgagctggtcctcgaggccccaaaagagagggcggaggccgtggcccggctggccaaggaggtcatggagggggtgtatcccctggccgtgcccctggaggtggaggtggggataggggaggactggctctccgccaaggagcaccaccaccaccaccac

SEQ ID NO: 79 - protein, 839 aa, Artificial Sequence
  Description of Artificial Sequence:  Synthetic
MNSGMLPLFEPKGRVLLVDGHHLAYRTFHALKGLTTSRGEPVQAVYGFAKSLLKALKEDGDAVIVVFDAKAPSFRHEAYGGYKAGRAPTPEDFPRQLALIKELVDLLGLARLEVPGYEADDVLASLAKKAEKEGYEVRILTADKDLYQLLSDRIHVLHPEGYLITPAWLWEKYGLRPDQWADYRALTGDESDNLPGVKGIGEKTARKLLEEWGSLEALLKNLDRLKPAIREKILAHMDDLKLSWDLAKVRTDLPLEVDFAKRREPDRERLRAFLERLEFGSLLHEFGLLESPKALEEAPWPPPEGAFVGFVLSRKEPMWADLLALAAARGGRVHRAADPLAGLKDLKEVRGLLAKDLAVLASREGLDLVPGDDPMLLAYLLDPSNTTPEGVARRYGGEWTEDAAHRALLSERLHRNLLKRLEGEEKLLWLYHEVEKPLSRVLAHMEATGVRRDVAYLQALSLELAEEIRRLEEEVFRLAGHPFNLNSRDQLERVLFDELRLPALGKTQKTGKRSTSAAVLEALREAHPIVEKILQHRELTKLKNTYVDPLPSLVHPRTGRLHTRFNQTATATGRLSSSDPNLQNIPVRTPLGQRIRRAFIAEEGWLLVALDYSQIELRVLAHLSGDENLIRVFQEGRDIHTETASWMFGVPREAVDPLMRRAAKTINFGVLYGMSAHRLSQELAIPYEEAQAFIERYFQSFPKVRAWIEKTLEEGRRRGYVETLFGRRRYVPDLEARVKSVREAAERMAFNMPVQGTAADLMKLAMVKLFPRLEEMGARMLLQVHNELVLEAPKERAEAVARLAKEVMEGVYPLAVPLEVEVGIGEDWLSAKEHHHHHH

SEQ ID NO: 80 - DNA, 2517 bp, Artificial Sequence
  Description of Artificial Sequence:  Synthetic
atgaattcggggatgctgcccctctttgagcccaagggccgggtcctcctggtggacggccaccacctggcctaccgcaccttccacgccctgaagggcctcaccaccagccggggggagccggtgcaggcggtctacggcttcgccaagagcctcctcaaggccctcaaggaggacggggacgcggtgatcgtggtctttgacgccaaggccccctccttccgccacgaggcctacggggggtacaaggcgggccgggcccccacgccggaggactttccccggcaactcgccctcatcaaggagctggtggacctcctggggctggcgcgcctcgaggtcccgggctacgaggcggacgacgtcctggccagcctggccaagaaggcggaaaaggagggctacgaggtccgcatcctcaccgccgacaaagacctttaccagctcctttccgaccgcatccacgtcctccaccccgaggggtacctcatcaccccggcctggctttgggaaaagtacggcctgaggcccgaccagtgggccgactaccgggccctgaccggggacgagtccgacaaccttcccggggtcaagggcatcggggagaagacggcgaggaagcttctggaggagtgggggagcctggaagccctcctcaagaacctggaccggctgaagcccgccatccgggagaagatcctggcccacatggacgatctgaagctctcctgggacctggccaaggtgcgcaccgacctgcccctggaggtggacttcgccaaaaggcgggagcccgaccgggagaggcttagggcctttctggagaggcttgagtttggcagcctcctccacgagttcggccttctggaaagccccaaggccctggaggaggccccctggcccccgccggaaggggccttcgtgggctttgtgctttcccgcaaggagcccatgtgggccgatcttctggccctggccgccgccaggggcggccgcgtccaccgggcccccgagccttataaagccctcagggacctgaaggaggcgcgggggcttctcgccaaagacctgagcgttctggccctgagggaaggccttggcctcccgcccggcgacgaccccatgctcctcgcctacctcctggacccttcgaacaccacccccgagggggtggcccggcgctacggcggggagtggacggaggaggcgggggagcgggccgccctttccgagaggctcttcgccaacctgtgggggaggcttgagggggaggagaggctcctttggctttaccgggaggtggagaggcccctttccgctgtcctggcccatatggaggccacgggggtgcgcctggacgtggcctatctcagggccttgtccctggaggtggccgaggagatcgcccgcctcgaggccgaggtcttccgcctggccggccaccccttcaacctcaactcccgggaccagctggaaagggtcctctttgacgagctagggcttcccgccatcggcaagacggagaagaccggcaagcgctccaccagcgccgccgtcctggaggccctccgcgaggcccaccccatcgtggagaagatcctgcagtaccgggagctcaccaagctgaagagcacctacattgaccccttgccggacctcatccaccccaggacgggccgcctccacacccgcttcaaccagacggccacggccacgggcaggctaagtagctccgatcccaacctccagaacatccccgtccgcaccccgcttgggcagaggatccgccgggccttcgtggccgaggcgggttgggcgttggtggccctggactatagccagatagagctccgcgtcctcgcccacctctccggggacgaaaacctgatcagggtcttccaggaggggaaggacatccacacccagaccgcaagctggatgttcggcgtccccccggaggccgtggaccccctgatgcgccgggcggccaagacggtgaacttcggcgtcctctacggcatgtccgcccataggctctcccaggagcttgccatcccctacgaggaggcggtggcctttatagagcgctacttccaaagcttccccaaggtgcgggcctggatagaaaagaccctggaggaggggaggaagcggggctacgtggaaaccctcttcggaagaaggcgctacgtgcccgacctcaacgcccgggtgaagagcgtcagggaggccgcggagcgcatggccttcaacatgcccgtccagggcaccgccgccgacctcatgaagctcgccatggtgaagctcttcccccgcctccgggagatgggggcccgcatgctcctccaggtccacaacgagctcctcctggaggccccccaagcgcgggccgaggaggtggcggctttggccaaggaggccatggagaaggcctatcccctcgccgtgcccctggaggtggaggtggggatgggggaggactggctttccgccaagggtcaccaccaccaccaccac

SEQ ID NO: 81 - protein, 839 aa, Artificial Sequence
  Description of Artificial Sequence:  Synthetic
MNSGMLPLFEPKGRVLLVDGHHLAYRTFHALKGLTTSRGEPVQAVYGFAKSLLKALKEDGDAVIVVFDAKAPSFRHEAYGGYKAGRAPTPEDFPRQLALIKELVDLLGLARLEVPGYEADDVLASLAKKAEKEGYEVRILTADKDLYQLLSDRIHVLHPEGYLITPAWLWEKYGLRPDQWADYRALTGDESDNLPGVKGIGEKTARKLLEEWGSLEALLKNLDRLKPAIREKILAHMDDLKLSWDLAKVRTDLPLEVDFAKRREPDRERLRAFLERLEFGSLLHEFGLLESPKALEEAPWPPPEGAFVGFVLSRKEPMWADLLALAAARGGRVHRAPEPYKALRDLKEARGLLAKDLSVLALREGLGLPPGDDPMLLAYLLDPSNTTPEGVARRYGGEWTEEAGERAALSERLFANLWGRLEGEERLLWLYREVERPLSAVLAHMEATGVRLDVAYLRALSLEVAEEIARLEAEVFRLAGHPFNLNSRDQLERVLFDELGLPAIGKTEKTGKRSTSAAVLEALREAHPIVEKILQYRELTKLKSTYIDPLPDLIHPRTGRLHTRFNQTATATGRLSSSDPNLQNIPVRTPLGQRIRRAFVAEAGWALVALDYSQIELRVLAHLSGDENLIRVFQEGKDIHTQTASWMFGVPPEAVDPLMRRAAKTVNFGVLYGMSAHRLSQELAIPYEEAVAFIERYFQSFPKVRAWIEKTLEEGRKRGYVETLFGRRRYVPDLNARVKSVREAAERMAFNMPVQGTAADLMKLAMVKLFPRLREMGARMLLQVHNELLLEAPQARAEEVAALAKEAMEKAYPLAVPLEVEVGMGEDWLSAKGHHHHHH

SEQ ID NO: 82 - DNA, 2517 bp, Artificial Sequence
  Description of Artificial Sequence:  Synthetic
atgaattcggggatgctgcccctctttgagcccaagggccgggtcctcctggtggacggccaccacctggcctaccgcaccttccacgccctgaagggcctcaccaccagccggggggagccggtgcaggcggtctacggcttcgccaagagcctcctcaaggccctcaaggaggacggggacgcggtgatcgtggtctttgacgccaaggccccctccttccgccacgaggcctacggggggtacaaggcgggccgggcccccacgccggaggactttccccggcaactcgccctcatcaaggagctggtggacctcctggggctggcgcgcctcgaggtcccgggctacgaggcggacgacgtcctggccagcctggccaagaaggcggaaaaggagggctacgaggtccgcatcctcaccgccgacaaagacctttaccagctcctttccgaccgcatccacgtcctccaccccgaggggtacctcatcaccccggcctggctttgggaaaagtacggcctgaggcccgaccagtgggccgactaccgggccctgaccggggacgagtccgacaaccttcccggggtcaagggcatcggggagaagacggcgaggaagcttctggaggagtgggggagcctggaagccctcctcaagaacctggaccggctgaagcccgccatccgggagaagatcctggcccacatggacgatctgaagctctcctgggacctggccaaggtgcgcaccgacctgcccctggaggtggacttcgccaaaaggcgggagcccgaccgggagaggcttagggcctttctggagaggcttgagtttggcagcctcctccacgagttcggccttctggaaagccccaaggccctggaggaggccccctggcccccgccggaaggggccttcgtgggctttgtgctttcccgcaaggagcccatgtgggccgatcttctggccctggccgccgccaggggcggccgcgtgcaccgggcagcagaccccttggcggggctaaaggacctcaaggaggtccggggcctcctcgccaaggacctcgccgtcttggcctcgagggaggggctagacctcgtgcccggggacgaccccatgctcctcgcctacctcctggacccttcgaacaccacccccgagggggtggcgcggcgctacgggggggagtggacggaggacgccgcccaccgggccctcctctcggagaggctccatcggaacctccttaagcgcctcgagggggaggagaagctcctttggctctaccacgaggtggaaaagcccctctcccgggtcctggcccatatggaggccacgggggtgcgcctggacgtggcctatctcagggccttgtccctggaggtggccgaggagatcgcccgcctcgaggccgaggtcttccgcctggccggccaccccttcaacctcaactcccgggaccagctggaaagggtcctctttgacgagctagggcttcccgccatcggcaagacggagaagaccggcaagcgctccaccagcgccgccgtcctggaggccctccgcgaggcccaccccatcgtggagaagatcctgcagtaccgggagctcaccaagctgaagagcacctacattgaccccttgccggacctcatccaccccaggacgggccgcctccacacccgcttcaaccagacggccacggccacgggcaggctaagtagctccgatcccaacctccagaacatccccgtccgcaccccgcttgggcagaggatccgccgggccttcatcgccgaggaggggtggctattggtggccctggactatagccagatagagctcagggtgctggcccacctctccggcgacgagaacctgatccgggtcttccaggaggggcgggacatccacacggagaccgccagctggatgttcggcgtcccccgggaggccgtggaccccctgatgcgccgggcggccaagaccatcaacttcggggtcctctacggcatgtcggcccaccgcctctcccaggagctagccatcccttacgaggaggcccaggccttcattgagcgctactttcagagcttccccaaggtgcgggcctggattgagaagaccctggaggagggcaggaggcgggggtacgtggagaccctcttcggccgccgccgctacgtgccagacctagaggcccgggtgaagagcgtgcgggaggcggccgagcgcatggccttcaacatgcccgtccagggcaccgccgccgacctcatgaagctggctatggtgaagctcttccccaggctggaggaaatgggggccaggatgctccttcaggtccacaacgagctggtcctcgaggccccaaaagagagggcggaggccgtggcccggctggccaaggaggtcatggagggggtgtatcccctggccgtgcccctggaggtggaggtggggataggggaggactggctctccgccaaggagcaccaccaccaccaccac

SEQ ID NO: 83 - protein, 839 aa, Artificial Sequence
  Description of Artificial Sequence:  Synthetic
MNSGMLPLFEPKGRVLLVDGHHLAYRTFHALKGLTTSRGEPVQAVYGFAKSLLKALKEDGDAVIVVFDAKAPSFRHEAYGGYKAGRAPTPEDFPRQLALIKELVDLLGLARLEVPGYEADDVLASLAKKAEKEGYEVRILTADKDLYQLLSDRIHVLHPEGYLITPAWLWEKYGLRPDQWADYRALTGDESDNLPGVKGIGEKTARKLLEEWGSLEALLKNLDRLKPAIREKILAHMDDLKLSWDLAKVRTDLPLEVDFAKRREPDRERLRAFLERLEFGSLLHEFGLLESPKALEEAPWPPPEGAFVGFVLSRKEPMWADLLALAAARGGRVHRAADPLAGLKDLKEVRGLLAKDLAVLASREGLDLVPGDDPMLLAYLLDPSNTTPEGVARRYGGEWTEDAAHRALLSERLHRNLLKRLEGEEKLLWLYHEVEKPLSRVLAHMEATGVRLDVAYLRALSLEVAEEIARLEAEVFRLAGHPFNLNSRDQLERVLFDELGLPAIGKTEKTGKRSTSAAVLEALREAHPIVEKILQYRELTKLKSTYIDPLPDLIHPRTGRLHTRFNQTATATGRLSSSDPNLQNIPVRTPLGQRIRRAFIAEEGWLLVALDYSQIELRVLAHLSGDENLIRVFQEGRDIHTETASWMFGVPREAVDPLMRRAAKTINFGVLYGMSAHRLSQELAIPYEEAQAFIERYFQSFPKVRAWIEKTLEEGRRRGYVETLFGRRRYVPDLEARVKSVREAAERMAFNMPVQGTAADLMKLAMVKLFPRLEEMGARMLLQVHNELVLEAPKERAEAVARLAKEVMEGVYPLAVPLEVEVGIGEDWLSAKEHHHHHH

SEQ ID NO: 84 - DNA, 2517 bp, Artificial Sequence
  Description of Artificial Sequence:  Synthetic
atgaattcggggatgctgcccctctttgagcccaagggccgggtcctcctggtggacggccaccacctggcctaccgcaccttccacgccctgaagggcctcaccaccagccggggggagccggtgcaggcggtctacggcttcgccaagagcctcctcaaggccctcaaggaggacggggacgcggtgatcgtggtctttgacgccaaggccccctccttccgccacgaggcctacggggggtacaaggcgggccgggcccccacgccggaggactttccccggcaactcgccctcatcaaggagctggtggacctcctggggctggcgcgcctcgaggtcccgggctacgaggcggacgacgtcctggccagcctggccaagaaggcggaaaaggagggctacgaggtccgcatcctcaccgccgacaaagacctttaccagctcctttccgaccgcatccacgtcctccaccccgaggggtacctcatcaccccggcctggctttgggaaaagtacggcctgaggcccgaccagtgggccgactaccgggccctgaccggggacgagtccgacaaccttcccggggtcaagggcatcggggagaagacggcgaggaagcttctggaggagtgggggagcctggaagccctcctcaagaacctggaccggctgaagcccgccatccgggagaagatcctggcccacatggacgatctgaagctctcctgggacctggccaaggtgcgcaccgacctgcccctggaggtggacttcgccaaaaggcgggagcccgaccgggagaggcttagggcctttctggagaggcttgagtttggcagcctcctccacgagttcggccttctggaaagccccaaggccctggaggaggccccctggcccccgccggaaggggccttcgtgggctttgtgctttcccgcaaggagcccatgtgggccgatcttctggccctggccgccgccaggggcggccgcgtccaccgggcccccgagccttataaagccctcagggacctgaaggaggcgcgggggcttctcgccaaagacctgagcgttctggccctgagggaaggccttggcctcccgcccggcgacgaccccatgctcctcgcctacctcctggacccttcgaacaccacccccgagggggtggcccggcgctacggcggggagtggacggaggaggcgggggagcgggccgccctttccgagaggctcttcgccaacctgtgggggaggcttgagggggaggagaggctcctttggctttaccgggaggtggagaggcccctttccgctgtcctggcccatatggaggccaccggggtacggcgggacgtggcctaccttcaggccctttccctggagcttgcggaggagatccgccgcctcgaggaggaggtcttccgcttggcgggccaccccttcaacctcaactcccgggaccagctggaaagggtgctctttgacgagcttaggcttcccgccttggggaagacgcaaaagacaggcaagcgctccaccagcgccgcggtgctggaggccctacgggaggcccaccccatcgtggagaagatcctccagcaccgggagctcaccaagctcaagaacacctacgtggaccccctcccaagcctcgtccacccgaggacgggccgcctccacacccgcttcaaccagacggccacggccacggggaggcttagtagctccgaccccaacctgcagaacatccccgtccgcacccccttgggccagaggatccgccgggccttcatcgccgaggaggggtggctattggtggccctggactatagccagatagagctcagggtgctggcccacctctccggcgacgagaacctgatccgggtcttccaggaggggcgggacatccacacggagaccgccagctggatgttcggcgtcccccgggaggccgtggaccccctgatgcgccgggcggccaagaccatcaacttcggggtcctctacggcatgtcggcccaccgcctctcccaggagctagccatcccttacgaggaggcccaggccttcattgagcgctactttcagagcttccccaaggtgcgggcctggattgagaagaccctggaggagggcaggaggcgggggtacgtggagaccctcttcggccgccgccgctacgtgccagacctagaggcccgggtgaagagcgtgcgggaggcggccgagcgcatggccttcaacatgcccgtccagggcaccgccgccgacctcatgaagctggctatggtgaagctcttccccaggctggaggaaatgggggccaggatgctccttcaggtccacaacgagctggtcctcgaggccccaaaagagagggcggaggccgtggcccggctggccaaggaggtcatggagggggtgtatcccctggccgtgcccctggaggtggaggtggggataggggaggactggctctccgccaaggagcaccaccaccaccaccac

SEQ ID NO: 85 - protein, 839 aa, Artificial Sequence
  Description of Artificial Sequence:  Synthetic
MNSGMLPLFEPKGRVLLVDGHHLAYRTFHALKGLTTSRGEPVQAVYGFAKSLLKALKEDGDAVIVVFDAKAPSFRHEAYGGYKAGRAPTPEDFPRQLALIKELVDLLGLARLEVPGYEADDVLASLAKKAEKEGYEVRILTADKDLYQLLSDRIHVLHPEGYLITPAWLWEKYGLRPDQWADYRALTGDESDNLPGVKGIGEKTARKLLEEWGSLEALLKNLDRLKPAIREKILAHMDDLKLSWDLAKVRTDLPLEVDFAKRREPDRERLRAFLERLEFGSLLHEFGLLESPKALEEAPWPPPEGAFVGFVLSRKEPMWADLLALAAARGGRVHRAPEPYKALRDLKEARGLLAKDLSVLALREGLGLPPGDDPMLLAYLLDPSNTTPEGVARRYGGEWTEEAGERAALSERLFANLWGRLEGEERLLWLYREVERPLSAVLAHMEATGVRRDVAYLQALSLELAEEIRRLEEEVFRLAGHPFNLNSRDQLERVLFDELRLPALGKTQKTGKRSTSAAVLEALREAHPIVEKILQHRELTKLKNTYVDPLPSLVHPRTGRLHTRFNQTATATGRLSSSDPNLQNIPVRTPLGQRIRRAFIAEEGWLLVALDYSQIELRVLAHLSGDENLIRVFQEGRDIHTETASWMFGVPREAVDPLMRRAAKTINFGVLYGMSAHRLSQELAIPYEEAQAFIERYFQSFPKVRAWIEKTLEEGRRRGYVETLFGRRRYVPDLEARVKSVREAAERMAFNMPVQGTAADLMKLAMVKLFPRLEEMGARMLLQVHNELVLEAPKERAEAVARLAKEVMEGVYPLAVPLEVEVGIGEDWLSAKEHHHHHH

SEQ ID NO: 86 - DNA, 2517 bp, Artificial Sequence
  Description of Artificial Sequence:  Synthetic
atgaattcggggatgctgcccctctttgagcccaagggccgggtcctcctggtggacggccaccacctggcctaccgcaccttccacgccctgaagggcctcaccaccagccggggggagccggtgcaggcggtctacggcttcgccaagagcctcctcaaggccctcaaggaggacggggacgcggtgatcgtggtctttgacgccaaggccccctccttccgccacgaggcctacggggggtacaaggcgggccgggcccccacgccggaggactttccccggcaactcgccctcatcaaggagctggtggacctcctggggctggcgcgcctcgaggtcccgggctacgaggcggacgacgtcctggccagcctggccaagaaggcggaaaaggagggctacgaggtccgcatcctcaccgccgacaaagacctttaccagctcctttccgaccgcatccacgtcctccaccccgaggggtacctcatcaccccggcctggctttgggaaaagtacggcctgaggcccgaccagtgggccgactaccgggccctgaccggggacgagtccgacaaccttcccggggtcaagggcatcggggagaagacggcgaggaagcttctggaggagtgggggagcctggaagccctcctcaagaacctggaccggctgaagcccgccatccgggagaagatcctggcccacatggacgatctgaagctctcctgggacctggccaaggtgcgcaccgacctgcccctggaggtggacttcgccaaaaggcgggagcccgaccgggagaggcttagggcctttctggagaggcttgagtttggcagcctcctccacgagttcggccttctggaaagccccaaggccctggaggaggccccctggcccccgccggaaggggccttcgtgggctttgtgctttcccgcaaggagcccatgtgggccgatcttctggccctggccgccgccaggggcggccgcgtccaccgggcccccgagccttataaagccctcagggacctgaaggaggcgcgggggcttctcgccaaagacctgagcgttctggccctgagggaaggccttggcctcccgcccggcgacgaccccatgctcctcgcctacctcctggacccttcgaacaccacccccgagggggtggcgcggcgctacgggggggagtggacggaggacgccgcccaccgggccctcctctcggagaggctccatcggaacctccttaagcgcctcgagggggaggagaagctcctttggctctaccacgaggtggaaaagcccctctcccgggtcctggcccatatggaggccaccggggtacggcgggacgtggcctaccttcaggccctttccctggagcttgcggaggagatccgccgcctcgaggaggaggtcttccgcttggcgggccaccccttcaacctcaactcccgggaccagctggaaagggtgctctttgacgagcttaggcttcccgccttggggaagacgcaaaagacaggcaagcgctccaccagcgccgcggtgctggaggccctacgggaggcccaccccatcgtggagaagatcctccagcaccgggagctcaccaagctcaagaacacctacgtggaccccctcccaagcctcgtccacccgaggacgggccgcctccacacccgcttcaaccagacggccacggccacggggaggcttagtagctccgaccccaacctgcagaacatccccgtccgcacccccttgggccagaggatccgccgggccttcatcgccgaggaggggtggctattggtggccctggactatagccagatagagctcagggtgctggcccacctctccggcgacgagaacctgatccgggtcttccaggaggggcgggacatccacacggagaccgccagctggatgttcggcgtcccccgggaggccgtggaccccctgatgcgccgggcggccaagaccatcaacttcggggtcctctacggcatgtcggcccaccgcctctcccaggagctagccatcccttacgaggaggcccaggccttcattgagcgctactttcagagcttccccaaggtgcgggcctggattgagaagaccctggaggagggcaggaggcgggggtacgtggagaccctcttcggccgccgccgctacgtgccagacctagaggcccgggtgaagagcgtgcgggaggcggccgagcgcatggccttcaacatgcccgtccagggcaccgccgccgacctcatgaagctggctatggtgaagctcttccccaggctggaggaaatgggggccaggatgctccttcaggtccacaacgagctggtcctcgaggccccaaaagagagggcggaggccgtggcccggctggccaaggaggtcatggagggggtgtatcccctggccgtgcccctggaggtggaggtggggataggggaggactggctctccgccaaggagcaccaccaccaccaccac

SEQ ID NO: 87 - protein, 839 aa, Artificial Sequence
  Description of Artificial Sequence:  Synthetic
MNSGMLPLFEPKGRVLLVDGHHLAYRTFHALKGLTTSRGEPVQAVYGFAKSLLKALKEDGDAVIVVFDAKAPSFRHEAYGGYKAGRAPTPEDFPRQLALIKELVDLLGLARLEVPGYEADDVLASLAKKAEKEGYEVRILTADKDLYQLLSDRIHVLHPEGYLITPAWLWEKYGLRPDQWADYRALTGDESDNLPGVKGIGEKTARKLLEEWGSLEALLKNLDRLKPAIREKILAHMDDLKLSWDLAKVRTDLPLEVDFAKRREPDRERLRAFLERLEFGSLLHEFGLLESPKALEEAPWPPPEGAFVGFVLSRKEPMWADLLALAAARGGRVHRAPEPYKALRDLKEARGLLAKDLSVLALREGLGLPPGDDPMLLAYLLDPSNTTPEGVARRYGGEWTEDAAHRALLSERLHRNLLKRLEGEEKLLWLYHEVEKPLSRVLAHMEATGVRRDVAYLQALSLELAEEIRRLEEEVFRLAGHPFNLNSRDQLERVLFDELRLPALGKTQKTGKRSTSAAVLEALREAHPIVEKILQHRELTKLKNTYVDPLPSLVHPRTGRLHTRFNQTATATGRLSSSDPNLQNIPVRTPLGQRIRRAFIAEEGWLLVALDYSQIELRVLAHLSGDENLIRVFQEGRDIHTETASWMFGVPREAVDPLMRRAAKTINFGVLYGMSAHRLSQELAIPYEEAQAFIERYFQSFPKVRAWIEKTLEEGRRRGYVETLFGRRRYVPDLEARVKSVREAAERMAFNMPVQGTAADLMKLAMVKLFPRLEEMGARMLLQVHNELVLEAPKERAEAVARLAKEVMEGVYPLAVPLEVEVGIGEDWLSAKEHHHHHH

SEQ ID NO: 88 - DNA, 2517 bp, Artificial Sequence
  Description of Artificial Sequence:  Synthetic
atgaattcggggatgctgcccctctttgagcccaagggccgggtcctcctggtggacggccaccacctggcctaccgcaccttccacgccctgaagggcctcaccaccagccggggggagccggtgcaggcggtctacggcttcgccaagagcctcctcaaggccctcaaggaggacggggacgcggtgatcgtggtctttgacgccaaggccccctccttccgccacgaggcctacggggggtacaaggcgggccgggcccccacgccggaggactttccccggcaactcgccctcatcaaggagctggtggacctcctggggctggcgcgcctcgaggtcccgggctacgaggcggacgacgtcctggccagcctggccaagaaggcggaaaaggagggctacgaggtccgcatcctcaccgccgacaaagacctttaccagctcctttccgaccgcatccacgtcctccaccccgaggggtacctcatcaccccggcctggctttgggaaaagtacggcctgaggcccgaccagtgggccgactaccgggccctgaccggggacgagtccgacaaccttcccggggtcaagggcatcggggagaagacggcgaggaagcttctggaggagtgggggagcctggaagccctcctcaagaacctggaccggctgaagcccgccatccgggagaagatcctggcccacatggacgatctgaagctctcctgggacctggccaaggtgcgcaccgacctgcccctggaggtggacttcgccaaaaggcgggagcccgaccgggagaggcttagggcctttctggagaggcttgagtttggcagcctcctccacgagttcggccttctggaaagccccaaggccctggaggaggccccctggcccccgccggaaggggccttcgtgggctttgtgctttcccgcaaggagcccatgtgggccgatcttctggccctggccgccgccaggggcggccgcgtgcaccgggcagcagaccccttggcggggctaaaggacctcaaggaggtccggggcctcctcgccaaggacctcgccgtcttggcctcgagggaggggctagacctcgtgcccggggacgaccccatgctcctcgcctacctcctggacccttcgaacaccacccccgagggggtggcccggcgctacggcggggagtggacggaggaggcgggggagcgggccgccctttccgagaggctcttcgccaacctgtgggggaggcttgagggggaggagaggctcctttggctttaccgggaggtggagaggcccctttccgctgtcctggcccatatggaggccacgggggtgcgcctggacgtggcctatctcagggccttgtccctggaggtggccgaggagatcgcccgcctcgaggccgaggtcttccgcctggccggccaccccttcaacctcaactcccgggaccagctggaaagggtcctctttgacgagctagggcttcccgccatcggcaagacggagaagaccggcaagcgctccaccagcgccgccgtcctggaggccctccgcgaggcccaccccatcgtggagaagatcctgcagtaccgggagctcaccaagctgaagagcacctacattgaccccttgccggacctcatccaccccaggacgggccgcctccacacccgcttcaaccagacggccacggccacgggcaggctaagtagctccgatcccaacctccagaacatccccgtccgcaccccgcttgggcagaggatccgccgggccttcatcgccgaggaggggtggctattggtggccctggactatagccagatagagctcagggtgctggcccacctctccggcgacgagaacctgatccgggtcttccaggaggggcgggacatccacacggagaccgccagctggatgttcggcgtcccccgggaggccgtggaccccctgatgcgccgggcggccaagaccatcaacttcggggtcctctacggcatgtcggcccaccgcctctcccaggagctagccatcccttacgaggaggcccaggccttcattgagcgctactttcagagcttccccaaggtgcgggcctggattgagaagaccctggaggagggcaggaggcgggggtacgtggagaccctcttcggccgccgccgctacgtgccagacctagaggcccgggtgaagagcgtgcgggaggcggccgagcgcatggccttcaacatgcccgtccagggcaccgccgccgacctcatgaagctggctatggtgaagctcttccccaggctggaggaaatgggggccaggatgctccttcaggtccacaacgagctggtcctcgaggccccaaaagagagggcggaggccgtggcccggctggccaaggaggtcatggagggggtgtatcccctggccgtgcccctggaggtggaggtggggataggggaggactggctctccgccaaggagcaccaccaccaccaccac

SEQ ID NO: 89 - protein, 839 aa, Artificial Sequence
  Description of Artificial Sequence:  Synthetic
MNSGMLPLFEPKGRVLLVDGHHLAYRTFHALKGLTTSRGEPVQAVYGFAKSLLKALKEDGDAVIVVFDAKAPSFRHEAYGGYKAGRAPTPEDFPRQLALIKELVDLLGLARLEVPGYEADDVLASLAKKAEKEGYEVRILTADKDLYQLLSDRIHVLHPEGYLITPAWLWEKYGLRPDQWADYRALTGDESDNLPGVKGIGEKTARKLLEEWGSLEALLKNLDRLKPAIREKILAHMDDLKLSWDLAKVRTDLPLEVDFAKRREPDRERLRAFLERLEFGSLLHEFGLLESPKALEEAPWPPPEGAFVGFVLSRKEPMWADLLALAAARGGRVHRAADPLAGLKDLKEVRGLLAKDLAVLASREGLDLVPGDDPMLLAYLLDPSNTTPEGVARRYGGEWTEEAGERAALSERLFANLWGRLEGEERLLWLYREVERPLSAVLAHMEATGVRLDVAYLRALSLEVAEEIARLEAEVFRLAGHPFNLNSRDQLERVLFDELGLPAIGKTEKTGKRSTSAAVLEALREAHPIVEKILQYRELTKLKSTYIDPLPDLIHPRTGRLHTRFNQTATATGRLSSSDPNLQNIPVRTPLGQRIRRAFIAEEGWLLVALDYSQIELRVLAHLSGDENLIRVFQEGRDIHTETASWMFGVPREAVDPLMRRAAKTINFGVLYGMSAHRLSQELAIPYEEAQAFIERYFQSFPKVRAWIEKTLEEGRRRGYVETLFGRRRYVPDLEARVKSVREAAERMAFNMPVQGTAADLMKLAMVKLFPRLEEMGARMLLQVHNELVLEAPKERAEAVARLAKEVMEGVYPLAVPLEVEVGIGEDWLSAKEHHHHHH

SEQ ID NO: 90 - DNA, 2526 bp, Artificial Sequence
  Description of Artificial Sequence:  Synthetic
atgaattccgaggcgatgcttccgctctttgaacccaaaggccgggtcctcctggtggacggccaccacctggcctaccgcaccttcttcgccctgaagggcctcaccacgagccggggcgaaccggtgcaggcggtctacggcttcgccaagagcctcctcaaggccctgaaggaggacgggtacaaggccgtcttcgtggtctttgacgccaaggccccctccttccgccacgaggcctacgaggcctacaaggcggggagggccccgacccccgaggacttcccccggcagctcgccctcatcaaggagctggtggacctcctggggtttacccgcctcgaggtccccggctacgaggcggacgacgttctcgccaccctggccaagaaggcggaaaaggaggggtacgaggtgcgcatcctcaccgccgaccgcgacctctaccaactcgtctccgaccgcgtcgccgtcctccaccccgagggccacctcatcaccccggagtggctttgggagaagtacggcctcaggccggagcagtgggtggacttccgcgccctcgtgggggacccctccgacaacctccccggggtcaagggcatcggggagaagaccgccctcaagctcctcaaggagtggggaagcctggaaaacctcctcaagaacctggaccgggtaaagccagaaaacgtccgggagaagatcaaggcccacctggaagacctcaggctctccttggagctctcccgggtgcgcaccgacctccccctggaggtggacctcgcccaggggcgggagcccgaccgggaggggcttagggccttcctggagaggctggagttcggcagcctcctccacgagttcggcctcctggaggcccccgcccccctggaggaggccccctggcccccgccggaaggggccttcgtgggcttcgtcctctcccgccccgagcccatgtgggcggagcttaaagccctggccgcctgcaggggcggccgcgtgcaccgggcagcagaccccttggcggggctaaaggacctcaaggaggtccggggcctcctcgccaaggacctcgccgtcttggcctcgagggaggggctagacctcgtgcccggggacgaccccatgctcctcgcctacctcctggacccttcgaacaccacccccgagggggtggcgcggcgctacgggggggagtggacggaggacgccgcccaccgggccctcctctcggagaggctccatcggaacctccttaagcgcctcgagggggaggagaagctcctttggctctaccacgaggtggaaaagcccctctcccgggtcctggcccatatggaggccaccggggtacggcgggacgtggcctaccttcaggccctttccctggagcttgcggaggagatccgccgcctcgaggaggaggtcttccgcttggcgggccaccccttcaacctcaactcccgggaccagctggaaagggtgctctttgacgagcttaggcttcccgccttggggaagacgcaaaagacaggcaagcgctccaccagcgccgcggtgctggaggccctacgggaggcccaccccatcgtggagaagatcctccagcaccgggagctcaccaagctcaagaacacctacgtggaccccctcccaagcctcgtccacccgaggacgggccgcctccacacccgcttcaaccagacggccacggccacggggaggcttagtagctccgaccccaacctgcagaacatccccgtccgcacccccttgggccagaggatccgccgggccttcatcgccgaggaggggtggctattggtggccctggactatagccagatagagctcagggtgctggcccacctctccggcgacgagaacctgatccgggtcttccaggaggggcgggacatccacacggagaccgccagctggatgttcggcgtcccccgggaggccgtggaccccctgatgcgccgggcggccaagaccatcaacttcggggtcctctacggcatgtcggcccaccgcctctcccaggagctagccatcccttacgaggaggcccaggccttcattgagcgctactttcagagcttccccaaggtgcgggcctggattgagaagaccctggaggagggcaggaggcgggggtacgtggagaccctcttcggccgccgccgctacgtgccagacctagaggcccgggtgaagagcgtgcgggaggcggccgagcgcatggccttcaacatgcccgtccagggcaccgccgccgacctcatgaagctggctatggtgaagctcttccccaggctggaggaaatgggggccaggatgctccttcaggtccacaacgagctggtcctcgaggccccaaaagagagggcggaggccgtggcccggctggccaaggaggtcatggagggggtgtatcccctggccgtgcccctggaggtggaggtggggataggggaggactggctctccgccaaggagcaccaccaccaccaccac

SEQ ID NO: 91 - protein, 842 aa, Artificial Sequence
  Description of Artificial Sequence:  Synthetic
MNSEAMLPLFEPKGRVLLVDGHHLAYRTFFALKGLTTSRGEPVQAVYGFAKSLLKALKEDGYKAVFVVFDAKAPSFRHEAYEAYKAGRAPTPEDFPRQLALIKELVDLLGFTRLEVPGYEADDVLATLAKKAEKEGYEVRILTADRDLYQLVSDRVAVLHPEGHLITPEWLWEKYGLRPEQWVDFRALVGDPSDNLPGVKGIGEKTALKLLKEWGSLENLLKNLDRVKPENVREKIKAHLEDLRLSLELSRVRTDLPLEVDLAQGREPDREGLRAFLERLEFGSLLHEFGLLEAPAPLEEAPWPPPEGAFVGFVLSRPEPMWAELKALAACRGGRVHRAADPLAGLKDLKEVRGLLAKDLAVLASREGLDLVPGDDPMLLAYLLDPSNTTPEGVARRYGGEWTEDAAHRALLSERLHRNLLKRLEGEEKLLWLYHEVEKPLSRVLAHMEATGVRRDVAYLQALSLELAEEIRRLEEEVFRLAGHPFNLNSRDQLERVLFDELRLPALGKTQKTGKRSTSAAVLEALREAHPIVEKILQHRELTKLKNTYVDPLPSLVHPRTGRLHTRFNQTATATGRLSSSDPNLQNIPVRTPLGQRIRRAFIAEEGWLLVALDYSQIELRVLAHLSGDENLIRVFQEGRDIHTETASWMFGVPREAVDPLMRRAAKTINFGVLYGMSAHRLSQELAIPYEEAQAFIERYFQSFPKVRAWIEKTLEEGRRRGYVETLFGRRRYVPDLEARVKSVREAAERMAFNMPVQGTAADLMKLAMVKLFPRLEEMGARMLLQVHNELVLEAPKERAEAVARLAKEVMEGVYPLAVPLEVEVGIGEDWLSAKEHHHHHH

SEQ ID NO: 92 - DNA, 2526 bp, Artificial Sequence
  Description of Artificial Sequence:  Synthetic
atgaattccgaggcgatgcttccgctctttgaacccaaaggccgggtcctcctggtggacggccaccacctggcctaccgcaccttcttcgccctgaagggcctcaccacgagccggggcgaaccggtgcaggcggtctacggcttcgccaagagcctcctcaaggccctgaaggaggacgggtacaaggccgtcttcgtggtctttgacgccaaggccccctccttccgccacgaggcctacgaggcctacaaggcggggagggccccgacccccgaggacttcccccggcagctcgccctcatcaaggagctggtggacctcctggggtttacccgcctcgaggtccccggctacgaggcggacgacgttctcgccaccctggccaagaaggcggaaaaggaggggtacgaggtgcgcatcctcaccgccgaccgcgacctctaccaactcgtctccgaccgcgtcgccgtcctccaccccgagggccacctcatcaccccggagtggctttgggagaagtacggcctcaggccggagcagtgggtggacttccgcgccctcgtgggggacccctccgacaacctccccggggtcaagggcatcggggagaagaccgccctcaagctcctcaaggagtggggaagcctggaaaacctcctcaagaacctggaccgggtaaagccagaaaacgtccgggagaagatcaaggcccacctggaagacctcaggctctccttggagctctcccgggtgcgcaccgacctccccctggaggtggacctcgcccaggggcgggagcccgaccgggaggggcttagggccttcctggagaggctggagttcggcagcctcctccacgagttcggcctcctggaggcccccgcccccctggaggaggccccctggcccccgccggaaggggccttcgtgggcttcgtcctctcccgccccgagcccatgtgggcggagcttaaagccctggccgcctgcaggggcggccgcgtccaccgggcccccgagccttataaagccctcagggacctgaaggaggcgcgggggcttctcgccaaagacctgagcgttctggccctgagggaaggccttggcctcccgcccggcgacgaccccatgctcctcgcctacctcctggacccttcgaacaccacccccgagggggtggcccggcgctacggcggggagtggacggaggaggcgggggagcgggccgccctttccgagaggctcttcgccaacctgtgggggaggcttgagggggaggagaggctcctttggctttaccgggaggtggagaggcccctttccgctgtcctggcccatatggaggccacgggggtgcgcctggacgtggcctatctcagggccttgtccctggaggtggccgaggagatcgcccgcctcgaggccgaggtcttccgcctggccggccaccccttcaacctcaactcccgggaccagctggaaagggtcctctttgacgagctagggcttcccgccatcggcaagacggagaagaccggcaagcgctccaccagcgccgccgtcctggaggccctccgcgaggcccaccccatcgtggagaagatcctgcagtaccgggagctcaccaagctgaagagcacctacattgaccccttgccggacctcatccaccccaggacgggccgcctccacacccgcttcaaccagacggccacggccacgggcaggctaagtagctccgatcccaacctccagaacatccccgtccgcaccccgcttgggcagaggatccgccgggccttcgtggccgaggcgggttgggcgttggtggccctggactatagccagatagagctccgcgtcctcgcccacctctccggggacgaaaacctgatcagggtcttccaggaggggaaggacatccacacccagaccgcaagctggatgttcggcgtccccccggaggccgtggaccccctgatgcgccgggcggccaagacggtgaacttcggcgtcctctacggcatgtccgcccataggctctcccaggagcttgccatcccctacgaggaggcggtggcctttatagagcgctacttccaaagcttccccaaggtgcgggcctggatagaaaagaccctggaggaggggaggaagcggggctacgtggaaaccctcttcggaagaaggcgctacgtgcccgacctcaacgcccgggtgaagagcgtcagggaggccgcggagcgcatggccttcaacatgcccgtccagggcaccgccgccgacctcatgaagctcgccatggtgaagctcttcccccgcctccgggagatgggggcccgcatgctcctccaggtccacaacgagctcctcctggaggccccccaagcgcgggccgaggaggtggcggctttggccaaggaggccatggagaaggcctatcccctcgccgtgcccctggaggtggaggtggggatgggggaggactggctttccgccaagggtcaccaccaccaccaccac

SEQ ID NO: 93 - protein, 842 aa, Artificial Sequence
  Description of Artificial Sequence:  Synthetic
MNSEAMLPLFEPKGRVLLVDGHHLAYRTFFALKGLTTSRGEPVQAVYGFAKSLLKALKEDGYKAVFVVFDAKAPSFRHEAYEAYKAGRAPTPEDFPRQLALIKELVDLLGFTRLEVPGYEADDVLATLAKKAEKEGYEVRILTADRDLYQLVSDRVAVLHPEGHLITPEWLWEKYGLRPEQWVDFRALVGDPSDNLPGVKGIGEKTALKLLKEWGSLENLLKNLDRVKPENVREKIKAHLEDLRLSLELSRVRTDLPLEVDLAQGREPDREGLRAFLERLEFGSLLHEFGLLEAPAPLEEAPWPPPEGAFVGFVLSRPEPMWAELKALAACRGGRVHRAPEPYKALRDLKEARGLLAKDLSVLALREGLGLPPGDDPMLLAYLLDPSNTTPEGVARRYGGEWTEEAGERAALSERLFANLWGRLEGEERLLWLYREVERPLSAVLAHMEATGVRLDVAYLRALSLEVAEEIARLEAEVFRLAGHPFNLNSRDQLERVLFDELGLPAIGKTEKTGKRSTSAAVLEALREAHPIVEKILQYRELTKLKSTYIDPLPDLIHPRTGRLHTRFNQTATATGRLSSSDPNLQNIPVRTPLGQRIRRAFVAEAGWALVALDYSQIELRVLAHLSGDENLIRVFQEGKDIHTQTASWMFGVPPEAVDPLMRRAAKTVNFGVLYGMSAHRLSQELAIPYEEAVAFIERYFQSFPKVRAWIEKTLEEGRKRGYVETLFGRRRYVPDLNARVKSVREAAERMAFNMPVQGTAADLMKLAMVKLFPRLREMGARMLLQVHNELLLEAPQARAEEVAALAKEAMEKAYPLAVPLEVEVGMGEDWLSAKGHHHHHH

SEQ ID NO: 94 - DNA, 2499 bp, Artificial Sequence
  Description of Artificial Sequence:  Synthetic
atgaattcggggatgctgcccctctttgagcccaagggccgggtcctcctggtggacggccaccacctggcctaccgcaccttccacgccctgaagggcctcaccaccagccggggggagccggtgcaggcggtctacggcttcgccaagagcctcctcaaggccctcaaggaggacggggacgcggtgatcgtggtctttgacgccaaggccccctccttccgccacgaggcctacggggggtacaaggcgggccgggcccccacgccggaggactttccccggcaactcgccctcatcaaggagctggtggacctcctggggctggcgcgcctcgaggtcccgggctacgaggcggacgacgtcctggccagcctggccaagaaggcggaaaaggagggctacgaggtccgcatcctcaccgccgacaaagacctttaccagctcctttccgaccgcatccacgtcctccaccccgaggggtacctcatcaccccggcctggctttgggaaaagtacggcctgaggcccgaccagtgggccgactaccgggccctgaccggggacgagtccgacaaccttcccggggtcaagggcatcggggagaagacggcgaggaagcttctggaggagtgggggagcctggaagccctcctcaagaacctggaccggctgaagcccgccatccgggagaagatcctggcccacatggacgatctgaagctctcctgggacctggccaaggtgcgcaccgacctgcccctggaggtggacttcgccaaaaggcgggagcccgaccgggagaggcttagggcctttctggagaggcttgagtttggcagcctcctccacgagttcggccttctggaaagccccaaggccctggaggaggccccctggcccccgccggaaggggccttcgtgggctttgtgctttcccgcaaggagcccatgtgggccgatcttctggccctggccgccgccaggggcggccgcgtgcaccgggcagcagaccccttggcggggctaaaggacctcaaggaggtccggggcctcctcgccaaggacctcgccgtcttggcctcgagggaggggctagacctcgtgcccggggacgaccccatgctcctcgcctacctcctggacccttcgaacaccacccccgagggggtggcgcggcgctacgggggggagtggacggaggacgccgcccaccgggccctcctctcggagaggctccatcggaacctccttaagcgcctcgagggggaggagaagctcctttggctctaccacgaggtggaaaagcccctctcccgggtcctggcccatatggaggccaccggggtacggcgggacgtggcctaccttcaggccctttccctggagcttgcggaggagatccgccgcctcgaggaggaggtcttccgcttggcgggccaccccttcaacctcaactcccgggaccagctggaaagggtgctctttgacgagcttaggcttcccgccttggggaagacgcaaaagacaggcaagcgctccaccagcgccgcggtgctggaggccctacgggaggcccaccccatcgtggagaagatcctccagcaccgggagctcaccaagctcaagaacacctacgtggaccccctcccaagcctcgtccacccgaggacgggccgcctccacacccgcttcaaccagacggccacggccacggggaggcttagtagctccgaccccaacctgcagaacatccccgtccgcacccccttgggccagaggatccgccgggccttcgtggccgaggcgggttgggcgttggtggccctggactatagccagatagagctccgcgtcctcgcccacctctccggggacgaaaacctgatcagggtcttccaggaggggaaggacatccacacccagaccgcaagctggatgttcggcgtccccccggaggccgtggaccccctgatgcgccgggcggccaagacggtgaacttcggcgtcctctacggcatgtccgcccataggctctcccaggagcttgccatcccctacgaggaggcggtggcctttatagagcgctacttccaaagcttccccaaggtgcgggcctggatagaaaagaccctggaggaggggaggaagcggggctacgtggaaaccctcttcggaagaaggcgctacgtgcccgacctcaacgcccgggtgaagagcgtcagggaggccgcggagcgcatggccttcaacatgcccgtccagggcaccgccgccgacctcatgaagctcgccatggtgaagctcttcccccgcctccgggagatgggggcccgcatgctcctccaggtccacgacgagctcctcctggaggccccccaagcgcgggccgaggaggtggcggctttggccaaggaggccatggagaaggcctatcccctcgccgtgcccctggaggtggaggtggggatgggggaggactggctttccgccaagggt

SEQ ID NO: 95 - protein, 833 aa, Artificial Sequence
  Description of Artificial Sequence:  Synthetic
MNSGMLPLFEPKGRVLLVDGHHLAYRTFHALKGLTTSRGEPVQAVYGFAKSLLKALKEDGDAVIVVFDAKAPSFRHEAYGGYKAGRAPTPEDFPRQLALIKELVDLLGLARLEVPGYEADDVLASLAKKAEKEGYEVRILTADKDLYQLLSDRIHVLHPEGYLITPAWLWEKYGLRPDQWADYRALTGDESDNLPGVKGIGEKTARKLLEEWGSLEALLKNLDRLKPAIREKILAHMDDLKLSWDLAKVRTDLPLEVDFAKRREPDRERLRAFLERLEFGSLLHEFGLLESPKALEEAPWPPPEGAFVGFVLSRKEPMWADLLALAAARGGRVHRAADPLAGLKDLKEVRGLLAKDLAVLASREGLDLVPGDDPMLLAYLLDPSNTTPEGVARRYGGEWTEDAAHRALLSERLHRNLLKRLEGEEKLLWLYHEVEKPLSRVLAHMEATGVRRDVAYLQALSLELAEEIRRLEEEVFRLAGHPFNLNSRDQLERVLFDELRLPALGKTQKTGKRSTSAAVLEALREAHPIVEKILQHRELTKLKNTYVDPLPSLVHPRTGRLHTRFNQTATATGRLSSSDPNLQNIPVRTPLGQRIRRAFVAEAGWALVALDYSQIELRVLAHLSGDENLIRVFQEGKDIHTQTASWMFGVPPEAVDPLMRRAAKTVNFGVLYGMSAHRLSQELAIPYEEAVAFIERYFQSFPKVRAWIEKTLEEGRKRGYVETLFGRRRYVPDLNARVKSVREAAERMAFNMPVQGTAADLMKLAMVKLFPRLREMGARMLLQVHDELLLEAPQARAEEVAALAKEAMEKAYPLAVPLEVEVGMGEDWLSAKG

SEQ ID NO: 96 - DNA, 2499 bp, Artificial Sequence
  Description of Artificial Sequence:  Synthetic
atgaattcggggatgctgcccctctttgagcccaagggccgggtcctcctggtggacggccaccacctggcctaccgcaccttccacgccctgaagggcctcaccaccagccggggggagccggtgcaggcggtctacggcttcgccaagagcctcctcaaggccctcaaggaggacggggacgcggtgatcgtggtctttgacgccaaggccccctccttccgccacgaggcctacggggggtacaaggcgggccgggcccccacgccggaggactttccccggcaactcgccctcatcaaggagctggtggacctcctggggctggcgcgcctcgaggtcccgggctacgaggcggacgacgtcctggccagcctggccaagaaggcggaaaaggagggctacgaggtccgcatcctcaccgccgacaaagacctttaccagctcctttccgaccgcatccacgtcctccaccccgaggggtacctcatcaccccggcctggctttgggaaaagtacggcctgaggcccgaccagtgggccgactaccgggccctgaccggggacgagtccgacaaccttcccggggtcaagggcatcggggagaagacggcgaggaagcttctggaggagtgggggagcctggaagccctcctcaagaacctggaccggctgaagcccgccatccgggagaagatcctggcccacatggacgatctgaagctctcctgggacctggccaaggtgcgcaccgacctgcccctggaggtggacttcgccaaaaggcgggagcccgaccgggagaggcttagggcctttctggagaggcttgagtttggcagcctcctccacgagttcggccttctggaaagccccaaggccctggaggaggccccctggcccccgccggaaggggccttcgtgggctttgtgctttcccgcaaggagcccatgtgggccgatcttctggccctggccgccgccaggggcggccgcgtgcaccgggcagcagaccccttggcggggctaaaggacctcaaggaggtccggggcctcctcgccaaggacctcgccgtcttggcctcgagggaggggctagacctcgtgcccggggacgaccccatgctcctcgcctacctcctggacccttcgaacaccacccccgagggggtggcgcggcgctacgggggggagtggacggaggacgccgcccaccgggccctcctctcggagaggctccatcggaacctccttaagcgcctcgagggggaggagaagctcctttggctctaccacgaggtggaaaagcccctctcccgggtcctggcccatatggaggccaccggggtacggcgggacgtggcctaccttcaggccctttccctggagcttgcggaggagatccgccgcctcgaggaggaggtcttccgcttggcgggccaccccttcaacctcaactcccgggaccagctggaaagggtgctctttgacgagcttaggcttcccgccttggggaagacgcaaaagacaggcaagcgctccaccagcgccgcggtgctggaggccctacgggaggcccaccccatcgtggagaagatcctccagcaccgggagctcaccaagctcaagaacacctacgtggaccccctcccaagcctcgtccacccgaggacgggccgcctccacacccgcttcaaccagacggccacggccacggggaggcttagtagctccgaccccaacctgcagaacatccccgtccgcacccccttgggccagaggatccgccgggccttcatcgccgaggaggggtggctattggtggccctggactatagccagatagagctcagggtgctggcccacctctccggcgacgagaacctgatccgggtcttccaggaggggcgggacatccacacggagaccgccagctggatgttcggcgtcccccgggaggccgtggaccccctgatgcgccgggcggccaagaccatcaacttcggggtcctctacggcatgtcggcccaccgcctctcccaggagctagccatcccttacgaggaggcccaggccttcattgagcgctactttcagagcttccccaaggtgcgggcctggattgagaagaccctggaggagggcaggaggcgggggtacgtggagaccctcttcggccgccgccgctacgtgccagacctagaggcccgggtgaagagcgtgcgggaggcggccgagcgcatggccttcaacatgcccgtccagggcaccgccgccgacctcatgaagctggctatggtgaagctcttccccaggctggaggaaatgggggccaggatgctccttcaggtccacgacgagctggtcctcgaggccccaaaagagagggcggaggccgtggcccggctggccaaggaggtcatggagggggtgtatcccctggccgtgcccctggaggtggaggtggggataggggaggactggctctccgccaaggag

SEQ ID NO: 97 - protein, 833 aa, Artificial Sequence
  Description of Artificial Sequence:  Synthetic
MNSGMLPLFEPKGRVLLVDGHHLAYRTFHALKGLTTSRGEPVQAVYGFAKSLLKALKEDGDAVIVVFDAKAPSFRHEAYGGYKAGRAPTPEDFPRQLALIKELVDLLGLARLEVPGYEADDVLASLAKKAEKEGYEVRILTADKDLYQLLSDRIHVLHPEGYLITPAWLWEKYGLRPDQWADYRALTGDESDNLPGVKGIGEKTARKLLEEWGSLEALLKNLDRLKPAIREKILAHMDDLKLSWDLAKVRTDLPLEVDFAKRREPDRERLRAFLERLEFGSLLHEFGLLESPKALEEAPWPPPEGAFVGFVLSRKEPMWADLLALAAARGGRVHRAADPLAGLKDLKEVRGLLAKDLAVLASREGLDLVPGDDPMLLAYLLDPSNTTPEGVARRYGGEWTEDAAHRALLSERLHRNLLKRLEGEEKLLWLYHEVEKPLSRVLAHMEATGVRRDVAYLQALSLELAEEIRRLEEEVFRLAGHPFNLNSRDQLERVLFDELRLPALGKTQKTGKRSTSAAVLEALREAHPIVEKILQHRELTKLKNTYVDPLPSLVHPRTGRLHTRFNQTATATGRLSSSDPNLQNIPVRTPLGQRIRRAFIAEEGWLLVALDYSQIELRVLAHLSGDENLIRVFQEGRDIHTETASWMFGVPREAVDPLMRRAAKTINFGVLYGMSAHRLSQELAIPYEEAQAFIERYFQSFPKVRAWIEKTLEEGRRRGYVETLFGRRRYVPDLEARVKSVREAAERMAFNMPVQGTAADLMKLAMVKLFPRLEEMGARMLLQVHDELVLEAPKERAEAVARLAKEVMEGVYPLAVPLEVEVGIGEDWLSAKE

SEQ ID NO: 98 - DNA, 2499 bp, Artificial Sequence
  Description of Artificial Sequence:  Synthetic
atgaattcggggatgctgcccctctttgagcccaagggccgggtcctcctggtggacggccaccacctggcctaccgcaccttccacgccctgaagggcctcaccaccagccggggggagccggtgcaggcggtctacggcttcgccaagagcctcctcaaggccctcaaggaggacggggacgcggtgatcgtggtctttgacgccaaggccccctccttccgccacgaggcctacggggggtacaaggcgggccgggcccccacgccggaggactttccccggcaactcgccctcatcaaggagctggtggacctcctggggctggcgcgcctcgaggtcccgggctacgaggcggacgacgtcctggccagcctggccaagaaggcggaaaaggagggctacgaggtccgcatcctcaccgccgacaaagacctttaccagctcctttccgaccgcatccacgtcctccaccccgaggggtacctcatcaccccggcctggctttgggaaaagtacggcctgaggcccgaccagtgggccgactaccgggccctgaccggggacgagtccgacaaccttcccggggtcaagggcatcggggagaagacggcgaggaagcttctggaggagtgggggagcctggaagccctcctcaagaacctggaccggctgaagcccgccatccgggagaagatcctggcccacatggacgatctgaagctctcctgggacctggccaaggtgcgcaccgacctgcccctggaggtggacttcgccaaaaggcgggagcccgaccgggagaggcttagggcctttctggagaggcttgagtttggcagcctcctccacgagttcggccttctggaaagccccaaggccctggaggaggccccctggcccccgccggaaggggccttcgtgggctttgtgctttcccgcaaggagcccatgtgggccgatcttctggccctggccgccgccaggggcggccgcgtccaccgggcccccgagccttataaagccctcagggacctgaaggaggcgcgggggcttctcgccaaagacctgagcgttctggccctgagggaaggccttggcctcccgcccggcgacgaccccatgctcctcgcctacctcctggacccttcgaacaccacccccgagggggtggcccggcgctacggcggggagtggacggaggaggcgggggagcgggccgccctttccgagaggctcttcgccaacctgtgggggaggcttgagggggaggagaggctcctttggctttaccgggaggtggagaggcccctttccgctgtcctggcccatatggaggccacgggggtgcgcctggacgtggcctatctcagggccttgtccctggaggtggccgaggagatcgcccgcctcgaggccgaggtcttccgcctggccggccaccccttcaacctcaactcccgggaccagctggaaagggtcctctttgacgagctagggcttcccgccatcggcaagacggagaagaccggcaagcgctccaccagcgccgccgtcctggaggccctccgcgaggcccaccccatcgtggagaagatcctgcagtaccgggagctcaccaagctgaagagcacctacattgaccccttgccggacctcatccaccccaggacgggccgcctccacacccgcttcaaccagacggccacggccacgggcaggctaagtagctccgatcccaacctccagaacatccccgtccgcaccccgcttgggcagaggatccgccgggccttcgtggccgaggcgggttgggcgttggtggccctggactatagccagatagagctccgcgtcctcgcccacctctccggggacgaaaacctgatcagggtcttccaggaggggaaggacatccacacccagaccgcaagctggatgttcggcgtccccccggaggccgtggaccccctgatgcgccgggcggccaagacggtgaacttcggcgtcctctacggcatgtccgcccataggctctcccaggagcttgccatcccctacgaggaggcggtggcctttatagagcgctacttccaaagcttccccaaggtgcgggcctggatagaaaagaccctggaggaggggaggaagcggggctacgtggaaaccctcttcggaagaaggcgctacgtgcccgacctcaacgcccgggtgaagagcgtcagggaggccgcggagcgcatggccttcaacatgcccgtccagggcaccgccgccgacctcatgaagctcgccatggtgaagctcttcccccgcctccgggagatgggggcccgcatgctcctccaggtccacgacgagctcctcctggaggccccccaagcgcgggccgaggaggtggcggctttggccaaggaggccatggagaaggcctatcccctcgccgtgcccctggaggtggaggtggggatgggggaggactggctttccgccaagggt

SEQ ID NO: 99 - protein, 833 aa, Artificial Sequence
  Description of Artificial Sequence:  Synthetic
MNSGMLPLFEPKGRVLLVDGHHLAYRTFHALKGLTTSRGEPVQAVYGFAKSLLKALKEDGDAVIVVFDAKAPSFRHEAYGGYKAGRAPTPEDFPRQLALIKELVDLLGLARLEVPGYEADDVLASLAKKAEKEGYEVRILTADKDLYQLLSDRIHVLHPEGYLITPAWLWEKYGLRPDQWADYRALTGDESDNLPGVKGIGEKTARKLLEEWGSLEALLKNLDRLKPAIREKILAHMDDLKLSWDLAKVRTDLPLEVDFAKRREPDRERLRAFLERLEFGSLLHEFGLLESPKALEEAPWPPPEGAFVGFVLSRKEPMWADLLALAAARGGRVHRAPEPYKALRDLKEARGLLAKDLSVLALREGLGLPPGDDPMLLAYLLDPSNTTPEGVARRYGGEWTEEAGERAALSERLFANLWGRLEGEERLLWLYREVERPLSAVLAHMEATGVRLDVAYLRALSLEVAEEIARLEAEVFRLAGHPFNLNSRDQLERVLFDELGLPAIGKTEKTGKRSTSAAVLEALREAHPIVEKILQYRELTKLKSTYIDPLPDLIHPRTGRLHTRFNQTATATGRLSSSDPNLQNIPVRTPLGQRIRRAFVAEAGWALVALDYSQIELRVLAHLSGDENLIRVFQEGKDIHTQTASWMFGVPPEAVDPLMRRAAKTVNFGVLYGMSAHRLSQELAIPYEEAVAFIERYFQSFPKVRAWIEKTLEEGRKRGYVETLFGRRRYVPDLNARVKSVREAAERMAFNMPVQGTAADLMKLAMVKLFPRLREMGARMLLQVHDELLLEAPQARAEEVAALAKEAMEKAYPLAVPLEVEVGMGEDWLSAKG

SEQ ID NO: 100 - DNA, 2499 bp, Artificial Sequence
  Description of Artificial Sequence:  Synthetic
atgaattcggggatgctgcccctctttgagcccaagggccgggtcctcctggtggacggccaccacctggcctaccgcaccttccacgccctgaagggcctcaccaccagccggggggagccggtgcaggcggtctacggcttcgccaagagcctcctcaaggccctcaaggaggacggggacgcggtgatcgtggtctttgacgccaaggccccctccttccgccacgaggcctacggggggtacaaggcgggccgggcccccacgccggaggactttccccggcaactcgccctcatcaaggagctggtggacctcctggggctggcgcgcctcgaggtcccgggctacgaggcggacgacgtcctggccagcctggccaagaaggcggaaaaggagggctacgaggtccgcatcctcaccgccgacaaagacctttaccagctcctttccgaccgcatccacgtcctccaccccgaggggtacctcatcaccccggcctggctttgggaaaagtacggcctgaggcccgaccagtgggccgactaccgggccctgaccggggacgagtccgacaaccttcccggggtcaagggcatcggggagaagacggcgaggaagcttctggaggagtgggggagcctggaagccctcctcaagaacctggaccggctgaagcccgccatccgggagaagatcctggcccacatggacgatctgaagctctcctgggacctggccaaggtgcgcaccgacctgcccctggaggtggacttcgccaaaaggcgggagcccgaccgggagaggcttagggcctttctggagaggcttgagtttggcagcctcctccacgagttcggccttctggaaagccccaaggccctggaggaggccccctggcccccgccggaaggggccttcgtgggctttgtgctttcccgcaaggagcccatgtgggccgatcttctggccctggccgccgccaggggcggccgcgtccaccgggcccccgagccttataaagccctcagggacctgaaggaggcgcgggggcttctcgccaaagacctgagcgttctggccctgagggaaggccttggcctcccgcccggcgacgaccccatgctcctcgcctacctcctggacccttcgaacaccacccccgagggggtggcccggcgctacggcggggagtggacggaggaggcgggggagcgggccgccctttccgagaggctcttcgccaacctgcttaagaggcttgagggggaggagaggctcctttggctttaccgggaggtggagaggcccctttccgctgtcctggcccatatggaggccacgggggtgcgcctggacgtggcctatctcagggccttgtccctggaggtggccgaggagatcgcccgcctcgaggccgaggtcttccgcctggccggccaccccttcaacctcaactcccgggaccagctggaaagggtcctctttgacgagctagggcttcccgccatcggcaagacgcaaaagaccggcaagcgctccaccagcgccgccgtcctggaggccctccgcgaggcccaccccatcgtggagaagatcctgcagtaccgggagctcaccaagctgaagagcacctacattgaccccttgccggacctcatccaccccaggacgggccgcctccacacccgcttcaaccagacggccacggccacgggcaggctaagtagctccgatcccaacctccagaacatccccgtccgcaccccgcttgggcagaggatccgccgggccttcatcgccgaggaggggtggctattggtggccctggactatagccagatagagctcagggtgctggcccacctctccggcgacgagaacctgatccgggtcttccaggaggggcgggacatccacacggagaccgccagctggatgttcggcgtcccccgggaggccgtggaccccctgatgcgccgggcggccaagaccatcaacttcggggtcctctacggcatgtcggcccaccgcctctcccaggagctagccatcccttacgaggaggcccaggccttcattgagcgctactttcagagcttccccaaggtgcgggcctggattgagaagaccctggaggagggcaggaggcgggggtacgtggagaccctcttcggccgccgccgctacgtgccagacctagaggcccgggtgaagagcgtgcgggaggcggccgagcgcatggccttcaacatgcccgtccagggcaccgccgccgacctcatgaagctggctatggtgaagctcttccccaggctggaggaaatgggggccaggatgctccttcaggtccacgacgagctggtcctcgaggccccaaaagagagggcggaggccgtggcccggctggccaaggaggtcatggagggggtgtatcccctggccgtgcccctggaggtggaggtggggataggggaggactggctctccgccaaggag

SEQ ID NO: 101 - protein, 833 aa, Artificial Sequence
  Description of Artificial Sequence:  Synthetic
MNSGMLPLFEPKGRVLLVDGHHLAYRTFHALKGLTTSRGEPVQAVYGFAKSLLKALKEDGDAVIVVFDAKAPSFRHEAYGGYKAGRAPTPEDFPRQLALIKELVDLLGLARLEVPGYEADDVLASLAKKAEKEGYEVRILTADKDLYQLLSDRIHVLHPEGYLITPAWLWEKYGLRPDQWADYRALTGDESDNLPGVKGIGEKTARKLLEEWGSLEALLKNLDRLKPAIREKILAHMDDLKLSWDLAKVRTDLPLEVDFAKRREPDRERLRAFLERLEFGSLLHEFGLLESPKALEEAPWPPPEGAFVGFVLSRKEPMWADLLALAAARGGRVHRAPEPYKALRDLKEARGLLAKDLSVLALREGLGLPPGDDPMLLAYLLDPSNTTPEGVARRYGGEWTEEAGERAALSERLFANLLKRLEGEERLLWLYREVERPLSAVLAHMEATGVRLDVAYLRALSLEVAEEIARLEAEVFRLAGHPFNLNSRDQLERVLFDELGLPAIGKTQKTGKRSTSAAVLEALREAHPIVEKILQYRELTKLKSTYIDPLPDLIHPRTGRLHTRFNQTATATGRLSSSDPNLQNIPVRTPLGQRIRRAFIAEEGWLLVALDYSQIELRVLAHLSGDENLIRVFQEGRDIHTETASWMFGVPREAVDPLMRRAAKTINFGVLYGMSAHRLSQELAIPYEEAQAFIERYFQSFPKVRAWIEKTLEEGRRRGYVETLFGRRRYVPDLEARVKSVREAAERMAFNMPVQGTAADLMKLAMVKLFPRLEEMGARMLLQVHDELVLEAPKERAEAVARLAKEVMEGVYPLAVPLEVEVGIGEDWLSAKE

SEQ ID NO: 102 - DNA, 2517 bp, Artificial Sequence
  Description of Artificial Sequence:  Synthetic
atgaattcggggatgctgcccctctttgagcccaagggccgggtcctcctggtggacggccaccacctggcctaccgcaccttccacgccctgaagggcctcaccaccagccggggggagccggtgcaggcggtctacggcttcgccaagagcctcctcaaggccctcaaggaggacggggacgcggtgatcgtggtctttgacgccaaggccccctccttccgccacgaggcctacggggggtacaaggcgggccgggcccccacgccggaggactttccccggcaactcgccctcatcaaggagctggtggacctcctggggctggcgcgcctcgaggtcccgggctacgaggcggacgacgtcctggccagcctggccaagaaggcggaaaaggagggctacgaggtccgcatcctcaccgccgacaaagacctttaccagctcctttccgaccgcatccacgtcctccaccccgaggggtacctcatcaccccggcctggctttgggaaaagtacggcctgaggcccgaccagtgggccgactaccgggccctgaccggggacgagtccgacaaccttcccggggtcaagggcatcggggagaagacggcgaggaagcttctggaggagtgggggagcctggaagccctcctcaagaacctggaccggctgaagcccgccatccgggagaagatcctggcccacatggacgatctgaagctctcctgggacctggccaaggtgcgcaccgacctgcccctggaggtggacttcgccaaaaggcgggagcccgaccgggagaggcttagggcctttctggagaggcttgagtttggcagcctcctccacgagttcggccttctggaaagccccaaggccctggaggaggccccctggcccccgccggaaggggccttcgtgggctttgtgctttcccgcaaggagcccatgtgggccgatcttctggccctggccgccgccaggggcggccgcgtccaccgggcccccgagccttataaagccctcagggacctgaaggaggcgcgggggcttctcgccaaagacctgagcgttctggccctgagggaaggccttggcctcccgcccggcgacgaccccatgctcctcgcctacctcctggacccttcgaacaccacccccgagggggtggcccggcgctacggcggggagtggacggaggaggcggggcaccgggccgccctttccgagaggctcttcgccaacctgtgggggaggcttgagggggaggagaggctcctttggctttaccgggaggtggagaggcccctttccgctgtcctggcccatatggaggccaccggggtacggcgggacgtggcctaccttcaggccctttccctggagcttgcggaggagatccgccgcctcgaggaggaggtcttccgcttggcgggccaccccttcaacctcaactcccgggaccagctggaaagggtgctctttgacgagcttaggcttcccgccttggggaagacgcaaaagacaggcaagcgctccaccagcgccgcggtgctggaggccctacgggaggcccaccccatcgtggagaagatcctccagcaccgggagctcaccaagctcaagaacacctacgtggaccccctcccaagcctcgtccacccgaggacgggccgcctccacacccgcttcaaccagacggccacggccacggggaggcttagtagctccgaccccaacctgcagaacatccccgtccgcacccccttgggccagaggatccgccgggccttcatcgccgaggaggggtggctattggtggccctggactatagccagatagagctcagggtgctggcccacctctccggcgacgagaacctgatccgggtcttccaggaggggcgggacatccacacggagaccgccagctggatgttcggcgtcccccgggaggccgtggaccccctgatgcgccgggcggccaagaccatcaacttcggggtcctctacggcatgtcggcccaccgcctctcccaggagctagccatcccttacgaggaggcccaggccttcattgagcgctactttcagagcttccccaaggtgcgggcctggattgagaagaccctggaggagggcaggaggcgggggtacgtggagaccctcttcggccgccgccgctacgtgccagacctagaggcccgggtgaagagcgtgcgggaggcggccgagcgcatggccttcaacatgcccgtccagggcaccgccgccgacctcatgaagctggctatggtgaagctcttccccaggctggaggaaatgggggccaggatgctccttcaggtccacaacgagctggtcctcgaggccccaaaagagagggcggaggccgtggcccggctggccaaggaggtcatggagggggtgtatcccctggccgtgcccctggaggtggaggtggggataggggaggactggctctccgccaaggagcaccaccaccaccaccac

SEQ ID NO: 103 - protein, 839 aa, Artificial Sequence
  Description of Artificial Sequence:  Synthetic
MNSGMLPLFEPKGRVLLVDGHHLAYRTFHALKGLTTSRGEPVQAVYGFAKSLLKALKEDGDAVIVVFDAKAPSFRHEAYGGYKAGRAPTPEDFPRQLALIKELVDLLGLARLEVPGYEADDVLASLAKKAEKEGYEVRILTADKDLYQLLSDRIHVLHPEGYLITPAWLWEKYGLRPDQWADYRALTGDESDNLPGVKGIGEKTARKLLEEWGSLEALLKNLDRLKPAIREKILAHMDDLKLSWDLAKVRTDLPLEVDFAKRREPDRERLRAFLERLEFGSLLHEFGLLESPKALEEAPWPPPEGAFVGFVLSRKEPMWADLLALAAARGGRVHRAPEPYKALRDLKEARGLLAKDLSVLALREGLGLPPGDDPMLLAYLLDPSNTTPEGVARRYGGEWTEEAGHRAALSERLFANLWGRLEGEERLLWLYREVERPLSAVLAHMEATGVRRDVAYLQALSLELAEEIRRLEEEVFRLAGHPFNLNSRDQLERVLFDELRLPALGKTQKTGKRSTSAAVLEALREAHPIVEKILQHRELTKLKNTYVDPLPSLVHPRTGRLHTRFNQTATATGRLSSSDPNLQNIPVRTPLGQRIRRAFIAEEGWLLVALDYSQIELRVLAHLSGDENLIRVFQEGRDIHTETASWMFGVPREAVDPLMRRAAKTINFGVLYGMSAHRLSQELAIPYEEAQAFIERYFQSFPKVRAWIEKTLEEGRRRGYVETLFGRRRYVPDLEARVKSVREAAERMAFNMPVQGTAADLMKLAMVKLFPRLEEMGARMLLQVHNELVLEAPKERAEAVARLAKEVMEGVYPLAVPLEVEVGIGEDWLSAKEHHHHHH

SEQ ID NO: 104 - DNA, 27 bp, Artificial Sequence
  Description of Artificial Sequence:  Synthetic
gaggaggcggggcaccgggccgccctt

SEQ ID NO: 105 - DNA, 2517 bp, Artificial Sequence
  Description of Artificial Sequence:  Synthetic
atgaattcggggatgctgcccctctttgagcccaagggccgggtcctcctggtggacggccaccacctggcctaccgcaccttccacgccctgaagggcctcaccaccagccggggggagccggtgcaggcggtctacggcttcgccaagagcctcctcaaggccctcaaggaggacggggacgcggtgatcgtggtctttgacgccaaggccccctccttccgccacgaggcctacggggggtacaaggcgggccgggcccccacgccggaggactttccccggcaactcgccctcatcaaggagctggtggacctcctggggctggcgcgcctcgaggtcccgggctacgaggcggacgacgtcctggccagcctggccaagaaggcggaaaaggagggctacgaggtccgcatcctcaccgccgacaaagacctttaccagctcctttccgaccgcatccacgtcctccaccccgaggggtacctcatcaccccggcctggctttgggaaaagtacggcctgaggcccgaccagtgggccgactaccgggccctgaccggggacgagtccgacaaccttcccggggtcaagggcatcggggagaagacggcgaggaagcttctggaggagtgggggagcctggaagccctcctcaagaacctggaccggctgaagcccgccatccgggagaagatcctggcccacatggacgatctgaagctctcctgggacctggccaaggtgcgcaccgacctgcccctggaggtggacttcgccaaaaggcgggagcccgaccgggagaggcttagggcctttctggagaggcttgagtttggcagcctcctccacgagttcggccttctggaaagccccaaggccctggaggaggccccctggcccccgccggaaggggccttcgtgggctttgtgctttcccgcaaggagcccatgtgggccgatcttctggccctggccgccgccaggggcggccgcgtccaccgggcccccgagccttataaagccctcagggacctgaaggaggcgcgggggcttctcgccaaagacctgagcgttctggccctgagggaaggccttggcctcccgcccggcgacgaccccatgctcctcgcctacctcctggacccttcgaacaccacccccgagggggtggcccggcgctacggcggggagtggacggaggaggcgggggagcgggccgccctttccgagaggctccatcggaacctgtgggggaggcttgagggggaggagaggctcctttggctttaccgggaggtggagaggcccctttccgctgtcctggcccatatggaggccaccggggtacggcgggacgtggcctaccttcaggccctttccctggagcttgcggaggagatccgccgcctcgaggaggaggtcttccgcttggcgggccaccccttcaacctcaactcccgggaccagctggaaagggtgctctttgacgagcttaggcttcccgccttggggaagacgcaaaagacaggcaagcgctccaccagcgccgcggtgctggaggccctacgggaggcccaccccatcgtggagaagatcctccagcaccgggagctcaccaagctcaagaacacctacgtggaccccctcccaagcctcgtccacccgaggacgggccgcctccacacccgcttcaaccagacggccacggccacggggaggcttagtagctccgaccccaacctgcagaacatccccgtccgcacccccttgggccagaggatccgccgggccttcatcgccgaggaggggtggctattggtggccctggactatagccagatagagctcagggtgctggcccacctctccggcgacgagaacctgatccgggtcttccaggaggggcgggacatccacacggagaccgccagctggatgttcggcgtcccccgggaggccgtggaccccctgatgcgccgggcggccaagaccatcaacttcggggtcctctacggcatgtcggcccaccgcctctcccaggagctagccatcccttacgaggaggcccaggccttcattgagcgctactttcagagcttccccaaggtgcgggcctggattgagaagaccctggaggagggcaggaggcgggggtacgtggagaccctcttcggccgccgccgctacgtgccagacctagaggcccgggtgaagagcgtgcgggaggcggccgagcgcatggccttcaacatgcccgtccagggcaccgccgccgacctcatgaagctggctatggtgaagctcttccccaggctggaggaaatgggggccaggatgctccttcaggtccacaacgagctggtcctcgaggccccaaaagagagggcggaggccgtggcccggctggccaaggaggtcatggagggggtgtatcccctggccgtgcccctggaggtggaggtggggataggggaggactggctctccgccaaggagcaccaccaccaccaccac

SEQ ID NO: 106 - protein, 839 aa, Artificial Sequence
  Description of Artificial Sequence:  Synthetic
MNSGMLPLFEPKGRVLLVDGHHLAYRTFHALKGLTTSRGEPVQAVYGFAKSLLKALKEDGDAVIVVFDAKAPSFRHEAYGGYKAGRAPTPEDFPRQLALIKELVDLLGLARLEVPGYEADDVLASLAKKAEKEGYEVRILTADKDLYQLLSDRIHVLHPEGYLITPAWLWEKYGLRPDQWADYRALTGDESDNLPGVKGIGEKTARKLLEEWGSLEALLKNLDRLKPAIREKILAHMDDLKLSWDLAKVRTDLPLEVDFAKRREPDRERLRAFLERLEFGSLLHEFGLLESPKALEEAPWPPPEGAFVGFVLSRKEPMWADLLALAAARGGRVHRAPEPYKALRDLKEARGLLAKDLSVLALREGLGLPPGDDPMLLAYLLDPSNTTPEGVARRYGGEWTEEAGERAALSERLHRNLWGRLEGEERLLWLYREVERPLSAVLAHMEATGVRRDVAYLQALSLELAEEIRRLEEEVFRLAGHPFNLNSRDQLERVLFDELRLPALGKTQKTGKRSTSAAVLEALREAHPIVEKILQHRELTKLKNTYVDPLPSLVHPRTGRLHTRFNQTATATGRLSSSDPNLQNIPVRTPLGQRIRRAFIAEEGWLLVALDYSQIELRVLAHLSGDENLIRVFQEGRDIHTETASWMFGVPREAVDPLMRRAAKTINFGVLYGMSAHRLSQELAIPYEEAQAFIERYFQSFPKVRAWIEKTLEEGRRRGYVETLFGRRRYVPDLEARVKSVREAAERMAFNMPVQGTAADLMKLAMVKLFPRLEEMGARMLLQVHNELVLEAPKERAEAVARLAKEVMEGVYPLAVPLEVEVGIGEDWLSAKEHHHHHH

SEQ ID NO: 107 - DNA, 36 bp, Artificial Sequence
  Description of Artificial Sequence:  Synthetic
ctttccgagaggctccatcggaacctgtgggggagg

SEQ ID NO: 108 - DNA, 2517 bp, Artificial Sequence
  Description of Artificial Sequence:  Synthetic
atgaattcggggatgctgcccctctttgagcccaagggccgggtcctcctggtggacggccaccacctggcctaccgcaccttccacgccctgaagggcctcaccaccagccggggggagccggtgcaggcggtctacggcttcgccaagagcctcctcaaggccctcaaggaggacggggacgcggtgatcgtggtctttgacgccaaggccccctccttccgccacgaggcctacggggggtacaaggcgggccgggcccccacgccggaggactttccccggcaactcgccctcatcaaggagctggtggacctcctggggctggcgcgcctcgaggtcccgggctacgaggcggacgacgtcctggccagcctggccaagaaggcggaaaaggagggctacgaggtccgcatcctcaccgccgacaaagacctttaccagctcctttccgaccgcatccacgtcctccaccccgaggggtacctcatcaccccggcctggctttgggaaaagtacggcctgaggcccgaccagtgggccgactaccgggccctgaccggggacgagtccgacaaccttcccggggtcaagggcatcggggagaagacggcgaggaagcttctggaggagtgggggagcctggaagccctcctcaagaacctggaccggctgaagcccgccatccgggagaagatcctggcccacatggacgatctgaagctctcctgggacctggccaaggtgcgcaccgacctgcccctggaggtggacttcgccaaaaggcgggagcccgaccgggagaggcttagggcctttctggagaggcttgagtttggcagcctcctccacgagttcggccttctggaaagccccaaggccctggaggaggccccctggcccccgccggaaggggccttcgtgggctttgtgctttcccgcaaggagcccatgtgggccgatcttctggccctggccgccgccaggggcggccgcgtccaccgggcccccgagccttataaagccctcagggacctgaaggaggcgcgggggcttctcgccaaagacctgagcgttctggccctgagggaaggccttggcctcccgcccggcgacgaccccatgctcctcgcctacctcctggacccttcgaacaccacccccgagggggtggcccggcgctacggcggggagtggacggaggaggcgggggagcgggccgccctttccgagaggctcttcgccaacctgcttaagaggcttgagggggaggagaggctcctttggctttaccgggaggtggagaggcccctttccgctgtcctggcccatatggaggccaccggggtacggcgggacgtggcctaccttcaggccctttccctggagcttgcggaggagatccgccgcctcgaggaggaggtcttccgcttggcgggccaccccttcaacctcaactcccgggaccagctggaaagggtgctctttgacgagcttaggcttcccgccttggggaagacgcaaaagacaggcaagcgctccaccagcgccgcggtgctggaggccctacgggaggcccaccccatcgtggagaagatcctccagcaccgggagctcaccaagctcaagaacacctacgtggaccccctcccaagcctcgtccacccgaggacgggccgcctccacacccgcttcaaccagacggccacggccacggggaggcttagtagctccgaccccaacctgcagaacatccccgtccgcacccccttgggccagaggatccgccgggccttcatcgccgaggaggggtggctattggtggccctggactatagccagatagagctcagggtgctggcccacctctccggcgacgagaacctgatccgggtcttccaggaggggcgggacatccacacggagaccgccagctggatgttcggcgtcccccgggaggccgtggaccccctgatgcgccgggcggccaagaccatcaacttcggggtcctctacggcatgtcggcccaccgcctctcccaggagctagccatcccttacgaggaggcccaggccttcattgagcgctactttcagagcttccccaaggtgcgggcctggattgagaagaccctggaggagggcaggaggcgggggtacgtggagaccctcttcggccgccgccgctacgtgccagacctagaggcccgggtgaagagcgtgcgggaggcggccgagcgcatggccttcaacatgcccgtccagggcaccgccgccgacctcatgaagctggctatggtgaagctcttccccaggctggaggaaatgggggccaggatgctccttcaggtccacaacgagctggtcctcgaggccccaaaagagagggcggaggccgtggcccggctggccaaggaggtcatggagggggtgtatcccctggccgtgcccctggaggtggaggtggggataggggaggactggctctccgccaaggagcaccaccaccaccaccac

SEQ ID NO: 109 - protein, 839 aa, Artificial Sequence
  Description of Artificial Sequence:  Synthetic
MNSGMLPLFEPKGRVLLVDGHHLAYRTFHALKGLTTSRGEPVQAVYGFAKSLLKALKEDGDAVIVVFDAKAPSFRHEAYGGYKAGRAPTPEDFPRQLALIKELVDLLGLARLEVPGYEADDVLASLAKKAEKEGYEVRILTADKDLYQLLSDRIHVLHPEGYLITPAWLWEKYGLRPDQWADYRALTGDESDNLPGVKGIGEKTARKLLEEWGSLEALLKNLDRLKPAIREKILAHMDDLKLSWDLAKVRTDLPLEVDFAKRREPDRERLRAFLERLEFGSLLHEFGLLESPKALEEAPWPPPEGAFVGFVLSRKEPMWADLLALAAARGGRVHRAPEPYKALRDLKEARGLLAKDLSVLALREGLGLPPGDDPMLLAYLLDPSNTTPEGVARRYGGEWTEEAGERAALSERLFANLLKRLEGEERLLWLYREVERPLSAVLAHMEATGVRRDVAYLQALSLELAEEIRRLEEEVFRLAGHPFNLNSRDQLERVLFDELRLPALGKTQKTGKRSTSAAVLEALREAHPIVEKILQHRELTKLKNTYVDPLPSLVHPRTGRLHTRFNQTATATGRLSSSDPNLQNIPVRTPLGQRIRRAFIAEEGWLLVALDYSQIELRVLAHLSGDENLIRVFQEGRDIHTETASWMFGVPREAVDPLMRRAAKTINFGVLYGMSAHRLSQELAIPYEEAQAFIERYFQSFPKVRAWIEKTLEEGRRRGYVETLFGRRRYVPDLEARVKSVREAAERMAFNMPVQGTAADLMKLAMVKLFPRLEEMGARMLLQVHNELVLEAPKERAEAVARLAKEVMEGVYPLAVPLEVEVGIGEDWLSAKEHHHHHH

SEQ ID NO: 110 - DNA, 36 bp, Artificial Sequence
  Description of Artificial Sequence:  Synthetic
ctcttcgccaacctgcttaagaggcttgagggggag

SEQ ID NO: 111 - DNA, 2517 bp, Artificial Sequence
  Description of Artificial Sequence:  Synthetic
atgaattcggggatgctgcccctctttgagcccaagggccgggtcctcctggtggacggccaccacctggcctaccgcaccttccacgccctgaagggcctcaccaccagccggggggagccggtgcaggcggtctacggcttcgccaagagcctcctcaaggccctcaaggaggacggggacgcggtgatcgtggtctttgacgccaaggccccctccttccgccacgaggcctacggggggtacaaggcgggccgggcccccacgccggaggactttccccggcaactcgccctcatcaaggagctggtggacctcctggggctggcgcgcctcgaggtcccgggctacgaggcggacgacgtcctggccagcctggccaagaaggcggaaaaggagggctacgaggtccgcatcctcaccgccgacaaagacctttaccagctcctttccgaccgcatccacgtcctccaccccgaggggtacctcatcaccccggcctggctttgggaaaagtacggcctgaggcccgaccagtgggccgactaccgggccctgaccggggacgagtccgacaaccttcccggggtcaagggcatcggggagaagacggcgaggaagcttctggaggagtgggggagcctggaagccctcctcaagaacctggaccggctgaagcccgccatccgggagaagatcctggcccacatggacgatctgaagctctcctgggacctggccaaggtgcgcaccgacctgcccctggaggtggacttcgccaaaaggcgggagcccgaccgggagaggcttagggcctttctggagaggcttgagtttggcagcctcctccacgagttcggccttctggaaagccccaaggccctggaggaggccccctggcccccgccggaaggggccttcgtgggctttgtgctttcccgcaaggagcccatgtgggccgatcttctggccctggccgccgccaggggcggccgcgtccaccgggcccccgagccttataaagccctcagggacctgaaggaggcgcgggggcttctcgccaaagacctgagcgttctggccctgagggaaggccttggcctcccgcccggcgacgaccccatgctcctcgcctacctcctggacccttcgaacaccacccccgagggggtggcccggcgctacggcggggagtggacggaggaggcgggggagcgggccgccctttccgagaggctcttcgccaacctgtgggggaggcttgagggggaggagaggctcctttggctttaccgggaggtggagaggcccctttcccgggtcctggcccatatggaggccaccggggtacggcgggacgtggcctaccttcaggccctttccctggagcttgcggaggagatccgccgcctcgaggaggaggtcttccgcttggcgggccaccccttcaacctcaactcccgggaccagctggaaagggtgctctttgacgagcttaggcttcccgccttggggaagacgcaaaagacaggcaagcgctccaccagcgccgcggtgctggaggccctacgggaggcccaccccatcgtggagaagatcctccagcaccgggagctcaccaagctcaagaacacctacgtggaccccctcccaagcctcgtccacccgaggacgggccgcctccacacccgcttcaaccagacggccacggccacggggaggcttagtagctccgaccccaacctgcagaacatccccgtccgcacccccttgggccagaggatccgccgggccttcatcgccgaggaggggtggctattggtggccctggactatagccagatagagctcagggtgctggcccacctctccggcgacgagaacctgatccgggtcttccaggaggggcgggacatccacacggagaccgccagctggatgttcggcgtcccccgggaggccgtggaccccctgatgcgccgggcggccaagaccatcaacttcggggtcctctacggcatgtcggcccaccgcctctcccaggagctagccatcccttacgaggaggcccaggccttcattgagcgctactttcagagcttccccaaggtgcgggcctggattgagaagaccctggaggagggcaggaggcgggggtacgtggagaccctcttcggccgccgccgctacgtgccagacctagaggcccgggtgaagagcgtgcgggaggcggccgagcgcatggccttcaacatgcccgtccagggcaccgccgccgacctcatgaagctggctatggtgaagctcttccccaggctggaggaaatgggggccaggatgctccttcaggtccacaacgagctggtcctcgaggccccaaaagagagggcggaggccgtggcccggctggccaaggaggtcatggagggggtgtatcccctggccgtgcccctggaggtggaggtggggataggggaggactggctctccgccaaggagcaccaccaccaccaccac

SEQ ID NO: 112 - protein, 839 aa, Artificial Sequence
  Description of Artificial Sequence:  Synthetic
MNSGMLPLFEPKGRVLLVDGHHLAYRTFHALKGLTTSRGEPVQAVYGFAKSLLKALKEDGDAVIVVFDAKAPSFRHEAYGGYKAGRAPTPEDFPRQLALIKELVDLLGLARLEVPGYEADDVLASLAKKAEKEGYEVRILTADKDLYQLLSDRIHVLHPEGYLITPAWLWEKYGLRPDQWADYRALTGDESDNLPGVKGIGEKTARKLLEEWGSLEALLKNLDRLKPAIREKILAHMDDLKLSWDLAKVRTDLPLEVDFAKRREPDRERLRAFLERLEFGSLLHEFGLLESPKALEEAPWPPPEGAFVGFVLSRKEPMWADLLALAAARGGRVHRAPEPYKALRDLKEARGLLAKDLSVLALREGLGLPPGDDPMLLAYLLDPSNTTPEGVARRYGGEWTEEAGERAALSERLFANLWGRLEGEERLLWLYREVERPLSRVLAHMEATGVRRDVAYLQALSLELAEEIRRLEEEVFRLAGHPFNLNSRDQLERVLFDELRLPALGKTQKTGKRSTSAAVLEALREAHPIVEKILQHRELTKLKNTYVDPLPSLVHPRTGRLHTRFNQTATATGRLSSSDPNLQNIPVRTPLGQRIRRAFIAEEGWLLVALDYSQIELRVLAHLSGDENLIRVFQEGRDIHTETASWMFGVPREAVDPLMRRAAKTINFGVLYGMSAHRLSQELAIPYEEAQAFIERYFQSFPKVRAWIEKTLEEGRRRGYVETLFGRRRYVPDLEARVKSVREAAERMAFNMPVQGTAADLMKLAMVKLFPRLEEMGARMLLQVHNELVLEAPKERAEAVARLAKEVMEGVYPLAVPLEVEVGIGEDWLSAKEHHHHHH

SEQ ID NO: 113 - DNA, 27 bp, Artificial Sequence
  Description of Artificial Sequence:  Synthetic
aggcccctttcccgggtcctggcccat

SEQ ID NO: 114 - DNA, 2517 bp, Artificial Sequence
  Description of Artificial Sequence:  Synthetic
atgaattcggggatgctgcccctctttgagcccaagggccgggtcctcctggtggacggccaccacctggcctaccgcaccttccacgccctgaagggcctcaccaccagccggggggagccggtgcaggcggtctacggcttcgccaagagcctcctcaaggccctcaaggaggacggggacgcggtgatcgtggtctttgacgccaaggccccctccttccgccacgaggcctacggggggtacaaggcgggccgggcccccacgccggaggactttccccggcaactcgccctcatcaaggagctggtggacctcctggggctggcgcgcctcgaggtcccgggctacgaggcggacgacgtcctggccagcctggccaagaaggcggaaaaggagggctacgaggtccgcatcctcaccgccgacaaagacctttaccagctcctttccgaccgcatccacgtcctccaccccgaggggtacctcatcaccccggcctggctttgggaaaagtacggcctgaggcccgaccagtgggccgactaccgggccctgaccggggacgagtccgacaaccttcccggggtcaagggcatcggggagaagacggcgaggaagcttctggaggagtgggggagcctggaagccctcctcaagaacctggaccggctgaagcccgccatccgggagaagatcctggcccacatggacgatctgaagctctcctgggacctggccaaggtgcgcaccgacctgcccctggaggtggacttcgccaaaaggcgggagcccgaccgggagaggcttagggcctttctggagaggcttgagtttggcagcctcctccacgagttcggccttctggaaagccccaaggccctggaggaggccccctggcccccgccggaaggggccttcgtgggctttgtgctttcccgcaaggagcccatgtgggccgatcttctggccctggccgccgccaggggcggccgcgtgcaccgggcagcagaccccttggcggggctaaaggacctcaaggaggtccggggcctcctcgccaaggacctcgccgtcttggcctcgagggaggggctagacctcgtgcccggggacgaccccatgctcctcgcctacctcctggacccttcgaacaccacccccgagggggtggcgcggcgctacgggggggagtggacggaggacgccgcccaccgggccctcctctcggagaggctccatcggaacctccttaagcgcctcgagggggaggagaagctcctttggctctaccacgaggtggaaaagcccctctcccgggtcctggcccatatggaggccacgggggtgcgccgggacgtggcctatctcagggccttgtccctggaggtggccgaggagatcgcccgcctcgaggccgaggtcttccgcctggccggccaccccttcaacctcaactcccgggaccagctggaaagggtcctctttgacgagctagggcttcccgccatcggcaagacggagaagaccggcaagcgctccaccagcgccgccgtcctggaggccctccgcgaggcccaccccatcgtggagaagatcctgcagtaccgggagctcaccaagctgaagagcacctacattgaccccttgccggacctcatccaccccaggacgggccgcctccacacccgcttcaaccagacggccacggccacgggcaggctaagtagctccgatcccaacctccagaacatccccgtccgcaccccgcttgggcagaggatccgccgggccttcatcgccgaggaggggtggctattggtggccctggactatagccagatagagctcagggtgctggcccacctctccggcgacgagaacctgatccgggtcttccaggaggggcgggacatccacacggagaccgccagctggatgttcggcgtcccccgggaggccgtggaccccctgatgcgccgggcggccaagaccatcaacttcggggtcctctacggcatgtcggcccaccgcctctcccaggagctagccatcccttacgaggaggcccaggccttcattgagcgctactttcagagcttccccaaggtgcgggcctggattgagaagaccctggaggagggcaggaggcgggggtacgtggagaccctcttcggccgccgccgctacgtgccagacctagaggcccgggtgaagagcgtgcgggaggcggccgagcgcatggccttcaacatgcccgtccagggcaccgccgccgacctcatgaagctggctatggtgaagctcttccccaggctggaggaaatgggggccaggatgctccttcaggtccacaacgagctggtcctcgaggccccaaaagagagggcggaggccgtggcccggctggccaaggaggtcatggagggggtgtatcccctggccgtgcccctggaggtggaggtggggataggggaggactggctctccgccaaggagcaccaccaccaccaccac

SEQ ID NO: 115 - protein, 839 aa, Artificial Sequence
  Description of Artificial Sequence:  Synthetic
MNSGMLPLFEPKGRVLLVDGHHLAYRTFHALKGLTTSRGEPVQAVYGFAKSLLKALKEDGDAVIVVFDAKAPSFRHEAYGGYKAGRAPTPEDFPRQLALIKELVDLLGLARLEVPGYEADDVLASLAKKAEKEGYEVRILTADKDLYQLLSDRIHVLHPEGYLITPAWLWEKYGLRPDQWADYRALTGDESDNLPGVKGIGEKTARKLLEEWGSLEALLKNLDRLKPAIREKILAHMDDLKLSWDLAKVRTDLPLEVDFAKRREPDRERLRAFLERLEFGSLLHEFGLLESPKALEEAPWPPPEGAFVGFVLSRKEPMWADLLALAAARGGRVHRAADPLAGLKDLKEVRGLLAKDLAVLASREGLDLVPGDDPMLLAYLLDPSNTTPEGVARRYGGEWTEDAAHRALLSERLHRNLLKRLEGEEKLLWLYHEVEKPLSRVLAHMEATGVRRDVAYLRALSLEVAEEIARLEAEVFRLAGHPFNLNSRDQLERVLFDELGLPAIGKTEKTGKRSTSAAVLEALREAHPIVEKILQYRELTKLKSTYIDPLPDLIHPRTGRLHTRFNQTATATGRLSSSDPNLQNIPVRTPLGQRIRRAFIAEEGWLLVALDYSQIELRVLAHLSGDENLIRVFQEGRDIHTETASWMFGVPREAVDPLMRRAAKTINFGVLYGMSAHRLSQELAIPYEEAQAFIERYFQSFPKVRAWIEKTLEEGRRRGYVETLFGRRRYVPDLEARVKSVREAAERMAFNMPVQGTAADLMKLAMVKLFPRLEEMGARMLLQVHNELVLEAPKERAEAVARLAKEVMEGVYPLAVPLEVEVGIGEDWLSAKEHHHHHH

SEQ ID NO: 116 - DNA, 27 bp, Artificial Sequence
  Description of Artificial Sequence:  Synthetic
acgggggtgcgccgggacgtggcctat

SEQ ID NO: 117 - DNA, 2517 bp, Artificial Sequence
  Description of Artificial Sequence:  Synthetic
atgaattcggggatgctgcccctctttgagcccaagggccgggtcctcctggtggacggccaccacctggcctaccgcaccttccacgccctgaagggcctcaccaccagccggggggagccggtgcaggcggtctacggcttcgccaagagcctcctcaaggccctcaaggaggacggggacgcggtgatcgtggtctttgacgccaaggccccctccttccgccacgaggcctacggggggtacaaggcgggccgggcccccacgccggaggactttccccggcaactcgccctcatcaaggagctggtggacctcctggggctggcgcgcctcgaggtcccgggctacgaggcggacgacgtcctggccagcctggccaagaaggcggaaaaggagggctacgaggtccgcatcctcaccgccgacaaagacctttaccagctcctttccgaccgcatccacgtcctccaccccgaggggtacctcatcaccccggcctggctttgggaaaagtacggcctgaggcccgaccagtgggccgactaccgggccctgaccggggacgagtccgacaaccttcccggggtcaagggcatcggggagaagacggcgaggaagcttctggaggagtgggggagcctggaagccctcctcaagaacctggaccggctgaagcccgccatccgggagaagatcctggcccacatggacgatctgaagctctcctgggacctggccaaggtgcgcaccgacctgcccctggaggtggacttcgccaaaaggcgggagcccgaccgggagaggcttagggcctttctggagaggcttgagtttggcagcctcctccacgagttcggccttctggaaagccccaaggccctggaggaggccccctggcccccgccggaaggggccttcgtgggctttgtgctttcccgcaaggagcccatgtgggccgatcttctggccctggccgccgccaggggcggccgcgtgcaccgggcagcagaccccttggcggggctaaaggacctcaaggaggtccggggcctcctcgccaaggacctcgccgtcttggcctcgagggaggggctagacctcgtgcccggggacgaccccatgctcctcgcctacctcctggacccttcgaacaccacccccgagggggtggcgcggcgctacgggggggagtggacggaggacgccgcccaccgggccctcctctcggagaggctccatcggaacctccttaagcgcctcgagggggaggagaagctcctttggctctaccacgaggtggaaaagcccctctcccgggtcctggcccatatggaggccacgggggtgcgcctggacgtggcctatctccaggccttgtccctggaggtggccgaggagatcgcccgcctcgaggccgaggtcttccgcctggccggccaccccttcaacctcaactcccgggaccagctggaaagggtcctctttgacgagctagggcttcccgccatcggcaagacggagaagaccggcaagcgctccaccagcgccgccgtcctggaggccctccgcgaggcccaccccatcgtggagaagatcctgcagtaccgggagctcaccaagctgaagagcacctacattgaccccttgccggacctcatccaccccaggacgggccgcctccacacccgcttcaaccagacggccacggccacgggcaggctaagtagctccgatcccaacctccagaacatccccgtccgcaccccgcttgggcagaggatccgccgggccttcatcgccgaggaggggtggctattggtggccctggactatagccagatagagctcagggtgctggcccacctctccggcgacgagaacctgatccgggtcttccaggaggggcgggacatccacacggagaccgccagctggatgttcggcgtcccccgggaggccgtggaccccctgatgcgccgggcggccaagaccatcaacttcggggtcctctacggcatgtcggcccaccgcctctcccaggagctagccatcccttacgaggaggcccaggccttcattgagcgctactttcagagcttccccaaggtgcgggcctggattgagaagaccctggaggagggcaggaggcgggggtacgtggagaccctcttcggccgccgccgctacgtgccagacctagaggcccgggtgaagagcgtgcgggaggcggccgagcgcatggccttcaacatgcccgtccagggcaccgccgccgacctcatgaagctggctatggtgaagctcttccccaggctggaggaaatgggggccaggatgctccttcaggtccacaacgagctggtcctcgaggccccaaaagagagggcggaggccgtggcccggctggccaaggaggtcatggagggggtgtatcccctggccgtgcccctggaggtggaggtggggataggggaggactggctctccgccaaggagcaccaccaccaccaccac

SEQ ID NO: 118 - protein, 839 aa, Artificial Sequence
  Description of Artificial Sequence:  Synthetic
MNSGMLPLFEPKGRVLLVDGHHLAYRTFHALKGLTTSRGEPVQAVYGFAKSLLKALKEDGDAVIVVFDAKAPSFRHEAYGGYKAGRAPTPEDFPRQLALIKELVDLLGLARLEVPGYEADDVLASLAKKAEKEGYEVRILTADKDLYQLLSDRIHVLHPEGYLITPAWLWEKYGLRPDQWADYRALTGDESDNLPGVKGIGEKTARKLLEEWGSLEALLKNLDRLKPAIREKILAHMDDLKLSWDLAKVRTDLPLEVDFAKRREPDRERLRAFLERLEFGSLLHEFGLLESPKALEEAPWPPPEGAFVGFVLSRKEPMWADLLALAAARGGRVHRAADPLAGLKDLKEVRGLLAKDLAVLASREGLDLVPGDDPMLLAYLLDPSNTTPEGVARRYGGEWTEDAAHRALLSERLHRNLLKRLEGEEKLLWLYHEVEKPLSRVLAHMEATGVRLDVAYLQALSLEVAEEIARLEAEVFRLAGHPFNLNSRDQLERVLFDELGLPAIGKTEKTGKRSTSAAVLEALREAHPIVEKILQYRELTKLKSTYIDPLPDLIHPRTGRLHTRFNQTATATGRLSSSDPNLQNIPVRTPLGQRIRRAFIAEEGWLLVALDYSQIELRVLAHLSGDENLIRVFQEGRDIHTETASWMFGVPREAVDPLMRRAAKTINFGVLYGMSAHRLSQELAIPYEEAQAFIERYFQSFPKVRAWIEKTLEEGRRRGYVETLFGRRRYVPDLEARVKSVREAAERMAFNMPVQGTAADLMKLAMVKLFPRLEEMGARMLLQVHNELVLEAPKERAEAVARLAKEVMEGVYPLAVPLEVEVGIGEDWLSAKEHHHHHH

SEQ ID NO: 119 - DNA, 27 bp, Artificial Sequence
  Description of Artificial Sequence:  Synthetic
gtggcctatctccaggccttgtccctg

SEQ ID NO: 120 - DNA, 2517 bp, Artificial Sequence
  Description of Artificial Sequence:  Synthetic
atgaattcggggatgctgcccctctttgagcccaagggccgggtcctcctggtggacggccaccacctggcctaccgcaccttccacgccctgaagggcctcaccaccagccggggggagccggtgcaggcggtctacggcttcgccaagagcctcctcaaggccctcaaggaggacggggacgcggtgatcgtggtctttgacgccaaggccccctccttccgccacgaggcctacggggggtacaaggcgggccgggcccccacgccggaggactttccccggcaactcgccctcatcaaggagctggtggacctcctggggctggcgcgcctcgaggtcccgggctacgaggcggacgacgtcctggccagcctggccaagaaggcggaaaaggagggctacgaggtccgcatcctcaccgccgacaaagacctttaccagctcctttccgaccgcatccacgtcctccaccccgaggggtacctcatcaccccggcctggctttgggaaaagtacggcctgaggcccgaccagtgggccgactaccgggccctgaccggggacgagtccgacaaccttcccggggtcaagggcatcggggagaagacggcgaggaagcttctggaggagtgggggagcctggaagccctcctcaagaacctggaccggctgaagcccgccatccgggagaagatcctggcccacatggacgatctgaagctctcctgggacctggccaaggtgcgcaccgacctgcccctggaggtggacttcgccaaaaggcgggagcccgaccgggagaggcttagggcctttctggagaggcttgagtttggcagcctcctccacgagttcggccttctggaaagccccaaggccctggaggaggccccctggcccccgccggaaggggccttcgtgggctttgtgctttcccgcaaggagcccatgtgggccgatcttctggccctggccgccgccaggggcggccgcgtgcaccgggcagcagaccccttggcggggctaaaggacctcaaggaggtccggggcctcctcgccaaggacctcgccgtcttggcctcgagggaggggctagacctcgtgcccggggacgaccccatgctcctcgcctacctcctggacccttcgaacaccacccccgagggggtggcgcggcgctacgggggggagtggacggaggacgccgcccaccgggccctcctctcggagaggctccatcggaacctccttaagcgcctcgagggggaggagaagctcctttggctctaccacgaggtggaaaagcccctctcccgggtcctggcccatatggaggccacgggggtgcgcctggacgtggcctatctcagggccttgtccctggagcttgccgaggagatcgcccgcctcgaggccgaggtcttccgcctggccggccaccccttcaacctcaactcccgggaccagctggaaagggtcctctttgacgagctagggcttcccgccatcggcaagacggagaagaccggcaagcgctccaccagcgccgccgtcctggaggccctccgcgaggcccaccccatcgtggagaagatcctgcagtaccgggagctcaccaagctgaagagcacctacattgaccccttgccggacctcatccaccccaggacgggccgcctccacacccgcttcaaccagacggccacggccacgggcaggctaagtagctccgatcccaacctccagaacatccccgtccgcaccccgcttgggcagaggatccgccgggccttcatcgccgaggaggggtggctattggtggccctggactatagccagatagagctcagggtgctggcccacctctccggcgacgagaacctgatccgggtcttccaggaggggcgggacatccacacggagaccgccagctggatgttcggcgtcccccgggaggccgtggaccccctgatgcgccgggcggccaagaccatcaacttcggggtcctctacggcatgtcggcccaccgcctctcccaggagctagccatcccttacgaggaggcccaggccttcattgagcgctactttcagagcttccccaaggtgcgggcctggattgagaagaccctggaggagggcaggaggcgggggtacgtggagaccctcttcggccgccgccgctacgtgccagacctagaggcccgggtgaagagcgtgcgggaggcggccgagcgcatggccttcaacatgcccgtccagggcaccgccgccgacctcatgaagctggctatggtgaagctcttccccaggctggaggaaatgggggccaggatgctccttcaggtccacaacgagctggtcctcgaggccccaaaagagagggcggaggccgtggcccggctggccaaggaggtcatggagggggtgtatcccctggccgtgcccctggaggtggaggtggggataggggaggactggctctccgccaaggagcaccaccaccaccaccac

SEQ ID NO: 121 - protein, 839 aa, Artificial Sequence
  Description of Artificial Sequence:  Synthetic
MNSGMLPLFEPKGRVLLVDGHHLAYRTFHALKGLTTSRGEPVQAVYGFAKSLLKALKEDGDAVIVVFDAKAPSFRHEAYGGYKAGRAPTPEDFPRQLALIKELVDLLGLARLEVPGYEADDVLASLAKKAEKEGYEVRILTADKDLYQLLSDRIHVLHPEGYLITPAWLWEKYGLRPDQWADYRALTGDESDNLPGVKGIGEKTARKLLEEWGSLEALLKNLDRLKPAIREKILAHMDDLKLSWDLAKVRTDLPLEVDFAKRREPDRERLRAFLERLEFGSLLHEFGLLESPKALEEAPWPPPEGAFVGFVLSRKEPMWADLLALAAARGGRVHRAADPLAGLKDLKEVRGLLAKDLAVLASREGLDLVPGDDPMLLAYLLDPSNTTPEGVARRYGGEWTEDAAHRALLSERLHRNLLKRLEGEEKLLWLYHEVEKPLSRVLAHMEATGVRLDVAYLRALSLELAEEIARLEAEVFRLAGHPFNLNSRDQLERVLFDELGLPAIGKTEKTGKRSTSAAVLEALREAHPIVEKILQYRELTKLKSTYIDPLPDLIHPRTGRLHTRFNQTATATGRLSSSDPNLQNIPVRTPLGQRIRRAFIAEEGWLLVALDYSQIELRVLAHLSGDENLIRVFQEGRDIHTETASWMFGVPREAVDPLMRRAAKTINFGVLYGMSAHRLSQELAIPYEEAQAFIERYFQSFPKVRAWIEKTLEEGRRRGYVETLFGRRRYVPDLEARVKSVREAAERMAFNMPVQGTAADLMKLAMVKLFPRLEEMGARMLLQVHNELVLEAPKERAEAVARLAKEVMEGVYPLAVPLEVEVGIGEDWLSAKEHHHHHH

SEQ ID NO: 122 - DNA, 27 bp, Artificial Sequence
  Description of Artificial Sequence:  Synthetic
ttgtccctggagcttgccgaggagatc

SEQ ID NO: 123 - DNA, 2517 bp, Artificial Sequence
  Description of Artificial Sequence:  Synthetic
atgaattcggggatgctgcccctctttgagcccaagggccgggtcctcctggtggacggccaccacctggcctaccgcaccttccacgccctgaagggcctcaccaccagccggggggagccggtgcaggcggtctacggcttcgccaagagcctcctcaaggccctcaaggaggacggggacgcggtgatcgtggtctttgacgccaaggccccctccttccgccacgaggcctacggggggtacaaggcgggccgggcccccacgccggaggactttccccggcaactcgccctcatcaaggagctggtggacctcctggggctggcgcgcctcgaggtcccgggctacgaggcggacgacgtcctggccagcctggccaagaaggcggaaaaggagggctacgaggtccgcatcctcaccgccgacaaagacctttaccagctcctttccgaccgcatccacgtcctccaccccgaggggtacctcatcaccccggcctggctttgggaaaagtacggcctgaggcccgaccagtgggccgactaccgggccctgaccggggacgagtccgacaaccttcccggggtcaagggcatcggggagaagacggcgaggaagcttctggaggagtgggggagcctggaagccctcctcaagaacctggaccggctgaagcccgccatccgggagaagatcctggcccacatggacgatctgaagctctcctgggacctggccaaggtgcgcaccgacctgcccctggaggtggacttcgccaaaaggcgggagcccgaccgggagaggcttagggcctttctggagaggcttgagtttggcagcctcctccacgagttcggccttctggaaagccccaaggccctggaggaggccccctggcccccgccggaaggggccttcgtgggctttgtgctttcccgcaaggagcccatgtgggccgatcttctggccctggccgccgccaggggcggccgcgtgcaccgggcagcagaccccttggcggggctaaaggacctcaaggaggtccggggcctcctcgccaaggacctcgccgtcttggcctcgagggaggggctagacctcgtgcccggggacgaccccatgctcctcgcctacctcctggacccttcgaacaccacccccgagggggtggcgcggcgctacgggggggagtggacggaggacgccgcccaccgggccctcctctcggagaggctccatcggaacctccttaagcgcctcgagggggaggagaagctcctttggctctaccacgaggtggaaaagcccctctcccgggtcctggcccatatggaggccacgggggtgcgcctggacgtggcctatctcagggccttgtccctggaggtggccgaggagatccgccgcctcgaggccgaggtcttccgcctggccggccaccccttcaacctcaactcccgggaccagctggaaagggtcctctttgacgagctagggcttcccgccatcggcaagacggagaagaccggcaagcgctccaccagcgccgccgtcctggaggccctccgcgaggcccaccccatcgtggagaagatcctgcagtaccgggagctcaccaagctgaagagcacctacattgaccccttgccggacctcatccaccccaggacgggccgcctccacacccgcttcaaccagacggccacggccacgggcaggctaagtagctccgatcccaacctccagaacatccccgtccgcaccccgcttgggcagaggatccgccgggccttcatcgccgaggaggggtggctattggtggccctggactatagccagatagagctcagggtgctggcccacctctccggcgacgagaacctgatccgggtcttccaggaggggcgggacatccacacggagaccgccagctggatgttcggcgtcccccgggaggccgtggaccccctgatgcgccgggcggccaagaccatcaacttcggggtcctctacggcatgtcggcccaccgcctctcccaggagctagccatcccttacgaggaggcccaggccttcattgagcgctactttcagagcttccccaaggtgcgggcctggattgagaagaccctggaggagggcaggaggcgggggtacgtggagaccctcttcggccgccgccgctacgtgccagacctagaggcccgggtgaagagcgtgcgggaggcggccgagcgcatggccttcaacatgcccgtccagggcaccgccgccgacctcatgaagctggctatggtgaagctcttccccaggctggaggaaatgggggccaggatgctccttcaggtccacaacgagctggtcctcgaggccccaaaagagagggcggaggccgtggcccggctggccaaggaggtcatggagggggtgtatcccctggccgtgcccctggaggtggaggtggggataggggaggactggctctccgccaaggagcaccaccaccaccaccac

SEQ ID NO: 124 - protein, 839 aa, Artificial Sequence
  Description of Artificial Sequence:  Synthetic
MNSGMLPLFEPKGRVLLVDGHHLAYRTFHALKGLTTSRGEPVQAVYGFAKSLLKALKEDGDAVIVVFDAKAPSFRHEAYGGYKAGRAPTPEDFPRQLALIKELVDLLGLARLEVPGYEADDVLASLAKKAEKEGYEVRILTADKDLYQLLSDRIHVLHPEGYLITPAWLWEKYGLRPDQWADYRALTGDESDNLPGVKGIGEKTARKLLEEWGSLEALLKNLDRLKPAIREKILAHMDDLKLSWDLAKVRTDLPLEVDFAKRREPDRERLRAFLERLEFGSLLHEFGLLESPKALEEAPWPPPEGAFVGFVLSRKEPMWADLLALAAARGGRVHRAADPLAGLKDLKEVRGLLAKDLAVLASREGLDLVPGDDPMLLAYLLDPSNTTPEGVARRYGGEWTEDAAHRALLSERLHRNLLKRLEGEEKLLWLYHEVEKPLSRVLAHMEATGVRLDVAYLRALSLEVAEEIRRLEAEVFRLAGHPFNLNSRDQLERVLFDELGLPAIGKTEKTGKRSTSAAVLEALREAHPIVEKILQYRELTKLKSTYIDPLPDLIHPRTGRLHTRFNQTATATGRLSSSDPNLQNIPVRTPLGQRIRRAFIAEEGWLLVALDYSQIELRVLAHLSGDENLIRVFQEGRDIHTETASWMFGVPREAVDPLMRRAAKTINFGVLYGMSAHRLSQELAIPYEEAQAFIERYFQSFPKVRAWIEKTLEEGRRRGYVETLFGRRRYVPDLEARVKSVREAAERMAFNMPVQGTAADLMKLAMVKLFPRLEEMGARMLLQVHNELVLEAPKERAEAVARLAKEVMEGVYPLAVPLEVEVGIGEDWLSAKEHHHHHH

SEQ ID NO: 125 - DNA, 27 bp, Artificial Sequence
  Description of Artificial Sequence:  Synthetic
gccgaggagatccgccgcctcgaggcc

SEQ ID NO: 126 - DNA, 2517 bp, Artificial Sequence
  Description of Artificial Sequence:  Synthetic
atgaattcggggatgctgcccctctttgagcccaagggccgggtcctcctggtggacggccaccacctggcctaccgcaccttccacgccctgaagggcctcaccaccagccggggggagccggtgcaggcggtctacggcttcgccaagagcctcctcaaggccctcaaggaggacggggacgcggtgatcgtggtctttgacgccaaggccccctccttccgccacgaggcctacggggggtacaaggcgggccgggcccccacgccggaggactttccccggcaactcgccctcatcaaggagctggtggacctcctggggctggcgcgcctcgaggtcccgggctacgaggcggacgacgtcctggccagcctggccaagaaggcggaaaaggagggctacgaggtccgcatcctcaccgccgacaaagacctttaccagctcctttccgaccgcatccacgtcctccaccccgaggggtacctcatcaccccggcctggctttgggaaaagtacggcctgaggcccgaccagtgggccgactaccgggccctgaccggggacgagtccgacaaccttcccggggtcaagggcatcggggagaagacggcgaggaagcttctggaggagtgggggagcctggaagccctcctcaagaacctggaccggctgaagcccgccatccgggagaagatcctggcccacatggacgatctgaagctctcctgggacctggccaaggtgcgcaccgacctgcccctggaggtggacttcgccaaaaggcgggagcccgaccgggagaggcttagggcctttctggagaggcttgagtttggcagcctcctccacgagttcggccttctggaaagccccaaggccctggaggaggccccctggcccccgccggaaggggccttcgtgggctttgtgctttcccgcaaggagcccatgtgggccgatcttctggccctggccgccgccaggggcggccgcgtgcaccgggcagcagaccccttggcggggctaaaggacctcaaggaggtccggggcctcctcgccaaggacctcgccgtcttggcctcgagggaggggctagacctcgtgcccggggacgaccccatgctcctcgcctacctcctggacccttcgaacaccacccccgagggggtggcgcggcgctacgggggggagtggacggaggacgccgcccaccgggccctcctctcggagaggctccatcggaacctccttaagcgcctcgagggggaggagaagctcctttggctctaccacgaggtggaaaagcccctctcccgggtcctggcccatatggaggccacgggggtgcgcctggacgtggcctatctcagggccttgtccctggaggtggccgaggagatcgcccgcctcgaggaggaggtcttccgcctggccggccaccccttcaacctcaactcccgggaccagctggaaagggtcctctttgacgagctagggcttcccgccatcggcaagacggagaagaccggcaagcgctccaccagcgccgccgtcctggaggccctccgcgaggcccaccccatcgtggagaagatcctgcagtaccgggagctcaccaagctgaagagcacctacattgaccccttgccggacctcatccaccccaggacgggccgcctccacacccgcttcaaccagacggccacggccacgggcaggctaagtagctccgatcccaacctccagaacatccccgtccgcaccccgcttgggcagaggatccgccgggccttcatcgccgaggaggggtggctattggtggccctggactatagccagatagagctcagggtgctggcccacctctccggcgacgagaacctgatccgggtcttccaggaggggcgggacatccacacggagaccgccagctggatgttcggcgtcccccgggaggccgtggaccccctgatgcgccgggcggccaagaccatcaacttcggggtcctctacggcatgtcggcccaccgcctctcccaggagctagccatcccttacgaggaggcccaggccttcattgagcgctactttcagagcttccccaaggtgcgggcctggattgagaagaccctggaggagggcaggaggcgggggtacgtggagaccctcttcggccgccgccgctacgtgccagacctagaggcccgggtgaagagcgtgcgggaggcggccgagcgcatggccttcaacatgcccgtccagggcaccgccgccgacctcatgaagctggctatggtgaagctcttccccaggctggaggaaatgggggccaggatgctccttcaggtccacaacgagctggtcctcgaggccccaaaagagagggcggaggccgtggcccggctggccaaggaggtcatggagggggtgtatcccctggccgtgcccctggaggtggaggtggggataggggaggactggctctccgccaaggagcaccaccaccaccaccac

SEQ ID NO: 127 - protein, 839 aa, Artificial Sequence
  Description of Artificial Sequence:  Synthetic
MNSGMLPLFEPKGRVLLVDGHHLAYRTFHALKGLTTSRGEPVQAVYGFAKSLLKALKEDGDAVIVVFDAKAPSFRHEAYGGYKAGRAPTPEDFPRQLALIKELVDLLGLARLEVPGYEADDVLASLAKKAEKEGYEVRILTADKDLYQLLSDRIHVLHPEGYLITPAWLWEKYGLRPDQWADYRALTGDESDNLPGVKGIGEKTARKLLEEWGSLEALLKNLDRLKPAIREKILAHMDDLKLSWDLAKVRTDLPLEVDFAKRREPDRERLRAFLERLEFGSLLHEFGLLESPKALEEAPWPPPEGAFVGFVLSRKEPMWADLLALAAARGGRVHRAADPLAGLKDLKEVRGLLAKDLAVLASREGLDLVPGDDPMLLAYLLDPSNTTPEGVARRYGGEWTEDAAHRALLSERLHRNLLKRLEGEEKLLWLYHEVEKPLSRVLAHMEATGVRLDVAYLRALSLEVAEEIARLEEEVFRLAGHPFNLNSRDQLERVLFDELGLPAIGKTEKTGKRSTSAAVLEALREAHPIVEKILQYRELTKLKSTYIDPLPDLIHPRTGRLHTRFNQTATATGRLSSSDPNLQNIPVRTPLGQRIRRAFIAEEGWLLVALDYSQIELRVLAHLSGDENLIRVFQEGRDIHTETASWMFGVPREAVDPLMRRAAKTINFGVLYGMSAHRLSQELAIPYEEAQAFIERYFQSFPKVRAWIEKTLEEGRRRGYVETLFGRRRYVPDLEARVKSVREAAERMAFNMPVQGTAADLMKLAMVKLFPRLEEMGARMLLQVHNELVLEAPKERAEAVARLAKEVMEGVYPLAVPLEVEVGIGEDWLSAKEHHHHHH

SEQ ID NO: 128 - DNA, 27 bp, Artificial Sequence
  Description of Artificial Sequence:  Synthetic
gcccgcctcgaggaggaggtcttccgc

SEQ ID NO: 129 - DNA, 2517 bp, Artificial Sequence
  Description of Artificial Sequence:  Synthetic
atgaattcggggatgctgcccctctttgagcccaagggccgggtcctcctggtggacggccaccacctggcctaccgcaccttccacgccctgaagggcctcaccaccagccggggggagccggtgcaggcggtctacggcttcgccaagagcctcctcaaggccctcaaggaggacggggacgcggtgatcgtggtctttgacgccaaggccccctccttccgccacgaggcctacggggggtacaaggcgggccgggcccccacgccggaggactttccccggcaactcgccctcatcaaggagctggtggacctcctggggctggcgcgcctcgaggtcccgggctacgaggcggacgacgtcctggccagcctggccaagaaggcggaaaaggagggctacgaggtccgcatcctcaccgccgacaaagacctttaccagctcctttccgaccgcatccacgtcctccaccccgaggggtacctcatcaccccggcctggctttgggaaaagtacggcctgaggcccgaccagtgggccgactaccgggccctgaccggggacgagtccgacaaccttcccggggtcaagggcatcggggagaagacggcgaggaagcttctggaggagtgggggagcctggaagccctcctcaagaacctggaccggctgaagcccgccatccgggagaagatcctggcccacatggacgatctgaagctctcctgggacctggccaaggtgcgcaccgacctgcccctggaggtggacttcgccaaaaggcgggagcccgaccgggagaggcttagggcctttctggagaggcttgagtttggcagcctcctccacgagttcggccttctggaaagccccaaggccctggaggaggccccctggcccccgccggaaggggccttcgtgggctttgtgctttcccgcaaggagcccatgtgggccgatcttctggccctggccgccgccaggggcggccgcgtgcaccgggcagcagaccccttggcggggctaaaggacctcaaggaggtccggggcctcctcgccaaggacctcgccgtcttggcctcgagggaggggctagacctcgtgcccggggacgaccccatgctcctcgcctacctcctggacccttcgaacaccacccccgagggggtggcgcggcgctacgggggggagtggacggaggacgccgcccaccgggccctcctctcggagaggctccatcggaacctccttaagcgcctcgagggggaggagaagctcctttggctctaccacgaggtggaaaagcccctctcccgggtcctggcccatatggaggccacgggggtgcgcctggacgtggcctatctcagggccttgtccctggaggtggccgaggagatcgcccgcctcgaggccgaggtcttccgcctggccggccaccccttcaacctcaactcccgggaccagctggaaagggtcctctttgacgagctaaggcttcccgccatcggcaagacggagaagaccggcaagcgctccaccagcgccgccgtcctggaggccctccgcgaggcccaccccatcgtggagaagatcctgcagtaccgggagctcaccaagctgaagagcacctacattgaccccttgccggacctcatccaccccaggacgggccgcctccacacccgcttcaaccagacggccacggccacgggcaggctaagtagctccgatcccaacctccagaacatccccgtccgcaccccgcttgggcagaggatccgccgggccttcatcgccgaggaggggtggctattggtggccctggactatagccagatagagctcagggtgctggcccacctctccggcgacgagaacctgatccgggtcttccaggaggggcgggacatccacacggagaccgccagctggatgttcggcgtcccccgggaggccgtggaccccctgatgcgccgggcggccaagaccatcaacttcggggtcctctacggcatgtcggcccaccgcctctcccaggagctagccatcccttacgaggaggcccaggccttcattgagcgctactttcagagcttccccaaggtgcgggcctggattgagaagaccctggaggagggcaggaggcgggggtacgtggagaccctcttcggccgccgccgctacgtgccagacctagaggcccgggtgaagagcgtgcgggaggcggccgagcgcatggccttcaacatgcccgtccagggcaccgccgccgacctcatgaagctggctatggtgaagctcttccccaggctggaggaaatgggggccaggatgctccttcaggtccacaacgagctggtcctcgaggccccaaaagagagggcggaggccgtggcccggctggccaaggaggtcatggagggggtgtatcccctggccgtgcccctggaggtggaggtggggataggggaggactggctctccgccaaggagcaccaccaccaccaccac

SEQ ID NO: 130 - protein, 839 aa, Artificial Sequence
  Description of Artificial Sequence:  Synthetic
MNSGMLPLFEPKGRVLLVDGHHLAYRTFHALKGLTTSRGEPVQAVYGFAKSLLKALKEDGDAVIVVFDAKAPSFRHEAYGGYKAGRAPTPEDFPRQLALIKELVDLLGLARLEVPGYEADDVLASLAKKAEKEGYEVRILTADKDLYQLLSDRIHVLHPEGYLITPAWLWEKYGLRPDQWADYRALTGDESDNLPGVKGIGEKTARKLLEEWGSLEALLKNLDRLKPAIREKILAHMDDLKLSWDLAKVRTDLPLEVDFAKRREPDRERLRAFLERLEFGSLLHEFGLLESPKALEEAPWPPPEGAFVGFVLSRKEPMWADLLALAAARGGRVHRAADPLAGLKDLKEVRGLLAKDLAVLASREGLDLVPGDDPMLLAYLLDPSNTTPEGVARRYGGEWTEDAAHRALLSERLHRNLLKRLEGEEKLLWLYHEVEKPLSRVLAHMEATGVRLDVAYLRALSLEVAEEIARLEAEVFRLAGHPFNLNSRDQLERVLFDELRLPAIGKTEKTGKRSTSAAVLEALREAHPIVEKILQYRELTKLKSTYIDPLPDLIHPRTGRLHTRFNQTATATGRLSSSDPNLQNIPVRTPLGQRIRRAFIAEEGWLLVALDYSQIELRVLAHLSGDENLIRVFQEGRDIHTETASWMFGVPREAVDPLMRRAAKTINFGVLYGMSAHRLSQELAIPYEEAQAFIERYFQSFPKVRAWIEKTLEEGRRRGYVETLFGRRRYVPDLEARVKSVREAAERMAFNMPVQGTAADLMKLAMVKLFPRLEEMGARMLLQVHNELVLEAPKERAEAVARLAKEVMEGVYPLAVPLEVEVGIGEDWLSAKEHHHHHH

SEQ ID NO: 131 - DNA, 27 bp, Artificial Sequence
  Description of Artificial Sequence:  Synthetic
tttgacgagctaaggcttcccgccatc

SEQ ID NO: 132 - DNA, 2517 bp, Artificial Sequence
  Description of Artificial Sequence:  Synthetic
atgaattcggggatgctgcccctctttgagcccaagggccgggtcctcctggtggacggccaccacctggcctaccgcaccttccacgccctgaagggcctcaccaccagccggggggagccggtgcaggcggtctacggcttcgccaagagcctcctcaaggccctcaaggaggacggggacgcggtgatcgtggtctttgacgccaaggccccctccttccgccacgaggcctacggggggtacaaggcgggccgggcccccacgccggaggactttccccggcaactcgccctcatcaaggagctggtggacctcctggggctggcgcgcctcgaggtcccgggctacgaggcggacgacgtcctggccagcctggccaagaaggcggaaaaggagggctacgaggtccgcatcctcaccgccgacaaagacctttaccagctcctttccgaccgcatccacgtcctccaccccgaggggtacctcatcaccccggcctggctttgggaaaagtacggcctgaggcccgaccagtgggccgactaccgggccctgaccggggacgagtccgacaaccttcccggggtcaagggcatcggggagaagacggcgaggaagcttctggaggagtgggggagcctggaagccctcctcaagaacctggaccggctgaagcccgccatccgggagaagatcctggcccacatggacgatctgaagctctcctgggacctggccaaggtgcgcaccgacctgcccctggaggtggacttcgccaaaaggcgggagcccgaccgggagaggcttagggcctttctggagaggcttgagtttggcagcctcctccacgagttcggccttctggaaagccccaaggccctggaggaggccccctggcccccgccggaaggggccttcgtgggctttgtgctttcccgcaaggagcccatgtgggccgatcttctggccctggccgccgccaggggcggccgcgtgcaccgggcagcagaccccttggcggggctaaaggacctcaaggaggtccggggcctcctcgccaaggacctcgccgtcttggcctcgagggaggggctagacctcgtgcccggggacgaccccatgctcctcgcctacctcctggacccttcgaacaccacccccgagggggtggcgcggcgctacgggggggagtggacggaggacgccgcccaccgggccctcctctcggagaggctccatcggaacctccttaagcgcctcgagggggaggagaagctcctttggctctaccacgaggtggaaaagcccctctcccgggtcctggcccatatggaggccacgggggtgcgcctggacgtggcctatctcagggccttgtccctggaggtggccgaggagatcgcccgcctcgaggccgaggtcttccgcctggccggccaccccttcaacctcaactcccgggaccagctggaaagggtcctctttgacgagctagggcttcccgccatcggcaagacgcaaaagaccggcaagcgctccaccagcgccgccgtcctggaggccctccgcgaggcccaccccatcgtggagaagatcctgcagtaccgggagctcaccaagctgaagagcacctacattgaccccttgccggacctcatccaccccaggacgggccgcctccacacccgcttcaaccagacggccacggccacgggcaggctaagtagctccgatcccaacctccagaacatccccgtccgcaccccgcttgggcagaggatccgccgggccttcatcgccgaggaggggtggctattggtggccctggactatagccagatagagctcagggtgctggcccacctctccggcgacgagaacctgatccgggtcttccaggaggggcgggacatccacacggagaccgccagctggatgttcggcgtcccccgggaggccgtggaccccctgatgcgccgggcggccaagaccatcaacttcggggtcctctacggcatgtcggcccaccgcctctcccaggagctagccatcccttacgaggaggcccaggccttcattgagcgctactttcagagcttccccaaggtgcgggcctggattgagaagaccctggaggagggcaggaggcgggggtacgtggagaccctcttcggccgccgccgctacgtgccagacctagaggcccgggtgaagagcgtgcgggaggcggccgagcgcatggccttcaacatgcccgtccagggcaccgccgccgacctcatgaagctggctatggtgaagctcttccccaggctggaggaaatgggggccaggatgctccttcaggtccacaacgagctggtcctcgaggccccaaaagagagggcggaggccgtggcccggctggccaaggaggtcatggagggggtgtatcccctggccgtgcccctggaggtggaggtggggataggggaggactggctctccgccaaggagcaccaccaccaccaccac

SEQ ID NO: 133 - protein, 839 aa, Artificial Sequence
  Description of Artificial Sequence:  Synthetic
MNSGMLPLFEPKGRVLLVDGHHLAYRTFHALKGLTTSRGEPVQAVYGFAKSLLKALKEDGDAVIVVFDAKAPSFRHEAYGGYKAGRAPTPEDFPRQLALIKELVDLLGLARLEVPGYEADDVLASLAKKAEKEGYEVRILTADKDLYQLLSDRIHVLHPEGYLITPAWLWEKYGLRPDQWADYRALTGDESDNLPGVKGIGEKTARKLLEEWGSLEALLKNLDRLKPAIREKILAHMDDLKLSWDLAKVRTDLPLEVDFAKRREPDRERLRAFLERLEFGSLLHEFGLLESPKALEEAPWPPPEGAFVGFVLSRKEPMWADLLALAAARGGRVHRAADPLAGLKDLKEVRGLLAKDLAVLASREGLDLVPGDDPMLLAYLLDPSNTTPEGVARRYGGEWTEDAAHRALLSERLHRNLLKRLEGEEKLLWLYHEVEKPLSRVLAHMEATGVRLDVAYLRALSLEVAEEIARLEAEVFRLAGHPFNLNSRDQLERVLFDELGLPAIGKTQKTGKRSTSAAVLEALREAHPIVEKILQYRELTKLKSTYIDPLPDLIHPRTGRLHTRFNQTATATGRLSSSDPNLQNIPVRTPLGQRIRRAFIAEEGWLLVALDYSQIELRVLAHLSGDENLIRVFQEGRDIHTETASWMFGVPREAVDPLMRRAAKTINFGVLYGMSAHRLSQELAIPYEEAQAFIERYFQSFPKVRAWIEKTLEEGRRRGYVETLFGRRRYVPDLEARVKSVREAAERMAFNMPVQGTAADLMKLAMVKLFPRLEEMGARMLLQVHNELVLEAPKERAEAVARLAKEVMEGVYPLAVPLEVEVGIGEDWLSAKEHHHHHH

SEQ ID NO: 134 - DNA, 27 bp, Artificial Sequence
  Description of Artificial Sequence:  Synthetic
atcgccaagacgcaaaagaccggcaag

SEQ ID NO: 135 - DNA, 2517 bp, Artificial Sequence
  Description of Artificial Sequence:  Synthetic
atgaattcggggatgctgcccctctttgagcccaagggccgggtcctcctggtggacggccaccacctggcctaccgcaccttccacgccctgaagggcctcaccaccagccggggggagccggtgcaggcggtctacggcttcgccaagagcctcctcaaggccctcaaggaggacggggacgcggtgatcgtggtctttgacgccaaggccccctccttccgccacgaggcctacggggggtacaaggcgggccgggcccccacgccggaggactttccccggcaactcgccctcatcaaggagctggtggacctcctggggctggcgcgcctcgaggtcccgggctacgaggcggacgacgtcctggccagcctggccaagaaggcggaaaaggagggctacgaggtccgcatcctcaccgccgacaaagacctttaccagctcctttccgaccgcatccacgtcctccaccccgaggggtacctcatcaccccggcctggctttgggaaaagtacggcctgaggcccgaccagtgggccgactaccgggccctgaccggggacgagtccgacaaccttcccggggtcaagggcatcggggagaagacggcgaggaagcttctggaggagtgggggagcctggaagccctcctcaagaacctggaccggctgaagcccgccatccgggagaagatcctggcccacatggacgatctgaagctctcctgggacctggccaaggtgcgcaccgacctgcccctggaggtggacttcgccaaaaggcgggagcccgaccgggagaggcttagggcctttctggagaggcttgagtttggcagcctcctccacgagttcggccttctggaaagccccaaggccctggaggaggccccctggcccccgccggaaggggccttcgtgggctttgtgctttcccgcaaggagcccatgtgggccgatcttctggccctggccgccgccaggggcggccgcgtgcaccgggcagcagaccccttggcggggctaaaggacctcaaggaggtccggggcctcctcgccaaggacctcgccgtcttggcctcgagggaggggctagacctcgtgcccggggacgaccccatgctcctcgcctacctcctggacccttcgaacaccacccccgagggggtggcgcggcgctacgggggggagtggacggaggacgccgcccaccgggccctcctctcggagaggctccatcggaacctccttaagcgcctcgagggggaggagaagctcctttggctctaccacgaggtggaaaagcccctctcccgggtcctggcccatatggaggccacgggggtgcgcctggacgtggcctatctcagggccttgtccctggaggtggccgaggagatcgcccgcctcgaggccgaggtcttccgcctggccggccaccccttcaacctcaactcccgggaccagctggaaagggtcctctttgacgagctagggcttcccgccatcggcaagacggagaagaccggcaagcgctccaccagcgccgccgtcctggaggccctccgcgaggcccaccccatcgtggagaagatcctgcagcaccgggagctcaccaagctgaagagcacctacattgaccccttgccggacctcatccaccccaggacgggccgcctccacacccgcttcaaccagacggccacggccacgggcaggctaagtagctccgatcccaacctccagaacatccccgtccgcaccccgcttgggcagaggatccgccgggccttcatcgccgaggaggggtggctattggtggccctggactatagccagatagagctcagggtgctggcccacctctccggcgacgagaacctgatccgggtcttccaggaggggcgggacatccacacggagaccgccagctggatgttcggcgtcccccgggaggccgtggaccccctgatgcgccgggcggccaagaccatcaacttcggggtcctctacggcatgtcggcccaccgcctctcccaggagctagccatcccttacgaggaggcccaggccttcattgagcgctactttcagagcttccccaaggtgcgggcctggattgagaagaccctggaggagggcaggaggcgggggtacgtggagaccctcttcggccgccgccgctacgtgccagacctagaggcccgggtgaagagcgtgcgggaggcggccgagcgcatggccttcaacatgcccgtccagggcaccgccgccgacctcatgaagctggctatggtgaagctcttccccaggctggaggaaatgggggccaggatgctccttcaggtccacaacgagctggtcctcgaggccccaaaagagagggcggaggccgtggcccggctggccaaggaggtcatggagggggtgtatcccctggccgtgcccctggaggtggaggtggggataggggaggactggctctccgccaaggagcaccaccaccaccaccac

SEQ ID NO: 136 - protein, 839 aa, Artificial Sequence
  Description of Artificial Sequence:  Synthetic
MNSGMLPLFEPKGRVLLVDGHHLAYRTFHALKGLTTSRGEPVQAVYGFAKSLLKALKEDGDAVIVVFDAKAPSFRHEAYGGYKAGRAPTPEDFPRQLALIKELVDLLGLARLEVPGYEADDVLASLAKKAEKEGYEVRILTADKDLYQLLSDRIHVLHPEGYLITPAWLWEKYGLRPDQWADYRALTGDESDNLPGVKGIGEKTARKLLEEWGSLEALLKNLDRLKPAIREKILAHMDDLKLSWDLAKVRTDLPLEVDFAKRREPDRERLRAFLERLEFGSLLHEFGLLESPKALEEAPWPPPEGAFVGFVLSRKEPMWADLLALAAARGGRVHRAADPLAGLKDLKEVRGLLAKDLAVLASREGLDLVPGDDPMLLAYLLDPSNTTPEGVARRYGGEWTEDAAHRALLSERLHRNLLKRLEGEEKLLWLYHEVEKPLSRVLAHMEATGVRLDVAYLRALSLEVAEEIARLEAEVFRLAGHPFNLNSRDQLERVLFDELGLPAIGKTEKTGKRSTSAAVLEALREAHPIVEKILQHRELTKLKSTYIDPLPDLIHPRTGRLHTRFNQTATATGRLSSSDPNLQNIPVRTPLGQRIRRAFIAEEGWLLVALDYSQIELRVLAHLSGDENLIRVFQEGRDIHTETASWMFGVPREAVDPLMRRAAKTINFGVLYGMSAHRLSQELAIPYEEAQAFIERYFQSFPKVRAWIEKTLEEGRRRGYVETLFGRRRYVPDLEARVKSVREAAERMAFNMPVQGTAADLMKLAMVKLFPRLEEMGARMLLQVHNELVLEAPKERAEAVARLAKEVMEGVYPLAVPLEVEVGIGEDWLSAKEHHHHHH

SEQ ID NO: 137 - DNA, 27 bp, Artificial Sequence
  Description of Artificial Sequence:  Synthetic
aagatcctgcagcaccgggagctcacc

SEQ ID NO: 138 - DNA, 2517 bp, Artificial Sequence
  Description of Artificial Sequence:  Synthetic
atgaattcggggatgctgcccctctttgagcccaagggccgggtcctcctggtggacggccaccacctggcctaccgcaccttccacgccctgaagggcctcaccaccagccggggggagccggtgcaggcggtctacggcttcgccaagagcctcctcaaggccctcaaggaggacggggacgcggtgatcgtggtctttgacgccaaggccccctccttccgccacgaggcctacggggggtacaaggcgggccgggcccccacgccggaggactttccccggcaactcgccctcatcaaggagctggtggacctcctggggctggcgcgcctcgaggtcccgggctacgaggcggacgacgtcctggccagcctggccaagaaggcggaaaaggagggctacgaggtccgcatcctcaccgccgacaaagacctttaccagctcctttccgaccgcatccacgtcctccaccccgaggggtacctcatcaccccggcctggctttgggaaaagtacggcctgaggcccgaccagtgggccgactaccgggccctgaccggggacgagtccgacaaccttcccggggtcaagggcatcggggagaagacggcgaggaagcttctggaggagtgggggagcctggaagccctcctcaagaacctggaccggctgaagcccgccatccgggagaagatcctggcccacatggacgatctgaagctctcctgggacctggccaaggtgcgcaccgacctgcccctggaggtggacttcgccaaaaggcgggagcccgaccgggagaggcttagggcctttctggagaggcttgagtttggcagcctcctccacgagttcggccttctggaaagccccaaggccctggaggaggccccctggcccccgccggaaggggccttcgtgggctttgtgctttcccgcaaggagcccatgtgggccgatcttctggccctggccgccgccaggggcggccgcgtgcaccgggcagcagaccccttggcggggctaaaggacctcaaggaggtccggggcctcctcgccaaggacctcgccgtcttggcctcgagggaggggctagacctcgtgcccggggacgaccccatgctcctcgcctacctcctggacccttcgaacaccacccccgagggggtggcgcggcgctacgggggggagtggacggaggacgccgcccaccgggccctcctctcggagaggctccatcggaacctccttaagcgcctcgagggggaggagaagctcctttggctctaccacgaggtggaaaagcccctctcccgggtcctggcccatatggaggccacgggggtgcgcctggacgtggcctatctcagggccttgtccctggaggtggccgaggagatcgcccgcctcgaggccgaggtcttccgcctggccggccaccccttcaacctcaactcccgggaccagctggaaagggtcctctttgacgagctagggcttcccgccatcggcaagacggagaagaccggcaagcgctccaccagcgccgccgtcctggaggccctccgcgaggcccaccccatcgtggagaagatcctgcagtaccgggagctcaccaagctgaagaacacctacattgaccccttgccggacctcatccaccccaggacgggccgcctccacacccgcttcaaccagacggccacggccacgggcaggctaagtagctccgatcccaacctccagaacatccccgtccgcaccccgcttgggcagaggatccgccgggccttcatcgccgaggaggggtggctattggtggccctggactatagccagatagagctcagggtgctggcccacctctccggcgacgagaacctgatccgggtcttccaggaggggcgggacatccacacggagaccgccagctggatgttcggcgtcccccgggaggccgtggaccccctgatgcgccgggcggccaagaccatcaacttcggggtcctctacggcatgtcggcccaccgcctctcccaggagctagccatcccttacgaggaggcccaggccttcattgagcgctactttcagagcttccccaaggtgcgggcctggattgagaagaccctggaggagggcaggaggcgggggtacgtggagaccctcttcggccgccgccgctacgtgccagacctagaggcccgggtgaagagcgtgcgggaggcggccgagcgcatggccttcaacatgcccgtccagggcaccgccgccgacctcatgaagctggctatggtgaagctcttccccaggctggaggaaatgggggccaggatgctccttcaggtccacaacgagctggtcctcgaggccccaaaagagagggcggaggccgtggcccggctggccaaggaggtcatggagggggtgtatcccctggccgtgcccctggaggtggaggtggggataggggaggactggctctccgccaaggagcaccaccaccaccaccac

SEQ ID NO: 139 - protein, 839 aa, Artificial Sequence
  Description of Artificial Sequence:  Synthetic
MNSGMLPLFEPKGRVLLVDGHHLAYRTFHALKGLTTSRGEPVQAVYGFAKSLLKALKEDGDAVIVVFDAKAPSFRHEAYGGYKAGRAPTPEDFPRQLALIKELVDLLGLARLEVPGYEADDVLASLAKKAEKEGYEVRILTADKDLYQLLSDRIHVLHPEGYLITPAWLWEKYGLRPDQWADYRALTGDESDNLPGVKGIGEKTARKLLEEWGSLEALLKNLDRLKPAIREKILAHMDDLKLSWDLAKVRTDLPLEVDFAKRREPDRERLRAFLERLEFGSLLHEFGLLESPKALEEAPWPPPEGAFVGFVLSRKEPMWADLLALAAARGGRVHRAADPLAGLKDLKEVRGLLAKDLAVLASREGLDLVPGDDPMLLAYLLDPSNTTPEGVARRYGGEWTEDAAHRALLSERLHRNLLKRLEGEEKLLWLYHEVEKPLSRVLAHMEATGVRLDVAYLRALSLEVAEEIARLEAEVFRLAGHPFNLNSRDQLERVLFDELGLPAIGKTEKTGKRSTSAAVLEALREAHPIVEKILQYRELTKLKNTYIDPLPDLIHPRTGRLHTRFNQTATATGRLSSSDPNLQNIPVRTPLGQRIRRAFIAEEGWLLVALDYSQIELRVLAHLSGDENLIRVFQEGRDIHTETASWMFGVPREAVDPLMRRAAKTINFGVLYGMSAHRLSQELAIPYEEAQAFIERYFQSFPKVRAWIEKTLEEGRRRGYVETLFGRRRYVPDLEARVKSVREAAERMAFNMPVQGTAADLMKLAMVKLFPRLEEMGARMLLQVHNELVLEAPKERAEAVARLAKEVMEGVYPLAVPLEVEVGIGEDWLSAKEHHHHHH

SEQ ID NO: 140 - DNA, 27 bp, Artificial Sequence
  Description of Artificial Sequence:  Synthetic
accaagctgaagaacacctacattgac

SEQ ID NO: 141 - DNA, 2517 bp, Artificial Sequence
  Description of Artificial Sequence:  Synthetic
atgaattcggggatgctgcccctctttgagcccaagggccgggtcctcctggtggacggccaccacctggcctaccgcaccttccacgccctgaagggcctcaccaccagccggggggagccggtgcaggcggtctacggcttcgccaagagcctcctcaaggccctcaaggaggacggggacgcggtgatcgtggtctttgacgccaaggccccctccttccgccacgaggcctacggggggtacaaggcgggccgggcccccacgccggaggactttccccggcaactcgccctcatcaaggagctggtggacctcctggggctggcgcgcctcgaggtcccgggctacgaggcggacgacgtcctggccagcctggccaagaaggcggaaaaggagggctacgaggtccgcatcctcaccgccgacaaagacctttaccagctcctttccgaccgcatccacgtcctccaccccgaggggtacctcatcaccccggcctggctttgggaaaagtacggcctgaggcccgaccagtgggccgactaccgggccctgaccggggacgagtccgacaaccttcccggggtcaagggcatcggggagaagacggcgaggaagcttctggaggagtgggggagcctggaagccctcctcaagaacctggaccggctgaagcccgccatccgggagaagatcctggcccacatggacgatctgaagctctcctgggacctggccaaggtgcgcaccgacctgcccctggaggtggacttcgccaaaaggcgggagcccgaccgggagaggcttagggcctttctggagaggcttgagtttggcagcctcctccacgagttcggccttctggaaagccccaaggccctggaggaggccccctggcccccgccggaaggggccttcgtgggctttgtgctttcccgcaaggagcccatgtgggccgatcttctggccctggccgccgccaggggcggccgcgtgcaccgggcagcagaccccttggcggggctaaaggacctcaaggaggtccggggcctcctcgccaaggacctcgccgtcttggcctcgagggaggggctagacctcgtgcccggggacgaccccatgctcctcgcctacctcctggacccttcgaacaccacccccgagggggtggcgcggcgctacgggggggagtggacggaggacgccgcccaccgggccctcctctcggagaggctccatcggaacctccttaagcgcctcgagggggaggagaagctcctttggctctaccacgaggtggaaaagcccctctcccgggtcctggcccatatggaggccacgggggtgcgcctggacgtggcctatctcagggccttgtccctggaggtggccgaggagatcgcccgcctcgaggccgaggtcttccgcctggccggccaccccttcaacctcaactcccgggaccagctggaaagggtcctctttgacgagctagggcttcccgccatcggcaagacggagaagaccggcaagcgctccaccagcgccgccgtcctggaggccctccgcgaggcccaccccatcgtggagaagatcctgcagtaccgggagctcaccaagctgaagagcacctacgtggaccccttgccggacctcatccaccccaggacgggccgcctccacacccgcttcaaccagacggccacggccacgggcaggctaagtagctccgatcccaacctccagaacatccccgtccgcaccccgcttgggcagaggatccgccgggccttcatcgccgaggaggggtggctattggtggccctggactatagccagatagagctcagggtgctggcccacctctccggcgacgagaacctgatccgggtcttccaggaggggcgggacatccacacggagaccgccagctggatgttcggcgtcccccgggaggccgtggaccccctgatgcgccgggcggccaagaccatcaacttcggggtcctctacggcatgtcggcccaccgcctctcccaggagctagccatcccttacgaggaggcccaggccttcattgagcgctactttcagagcttccccaaggtgcgggcctggattgagaagaccctggaggagggcaggaggcgggggtacgtggagaccctcttcggccgccgccgctacgtgccagacctagaggcccgggtgaagagcgtgcgggaggcggccgagcgcatggccttcaacatgcccgtccagggcaccgccgccgacctcatgaagctggctatggtgaagctcttccccaggctggaggaaatgggggccaggatgctccttcaggtccacaacgagctggtcctcgaggccccaaaagagagggcggaggccgtggcccggctggccaaggaggtcatggagggggtgtatcccctggccgtgcccctggaggtggaggtggggataggggaggactggctctccgccaaggagcaccaccaccaccaccac

SEQ ID NO: 142 - protein, 839 aa, Artificial Sequence
  Description of Artificial Sequence:  Synthetic
MNSGMLPLFEPKGRVLLVDGHHLAYRTFHALKGLTTSRGEPVQAVYGFAKSLLKALKEDGDAVIVVFDAKAPSFRHEAYGGYKAGRAPTPEDFPRQLALIKELVDLLGLARLEVPGYEADDVLASLAKKAEKEGYEVRILTADKDLYQLLSDRIHVLHPEGYLITPAWLWEKYGLRPDQWADYRALTGDESDNLPGVKGIGEKTARKLLEEWGSLEALLKNLDRLKPAIREKILAHMDDLKLSWDLAKVRTDLPLEVDFAKRREPDRERLRAFLERLEFGSLLHEFGLLESPKALEEAPWPPPEGAFVGFVLSRKEPMWADLLALAAARGGRVHRAADPLAGLKDLKEVRGLLAKDLAVLASREGLDLVPGDDPMLLAYLLDPSNTTPEGVARRYGGEWTEDAAHRALLSERLHRNLLKRLEGEEKLLWLYHEVEKPLSRVLAHMEATGVRLDVAYLRALSLEVAEEIARLEAEVFRLAGHPFNLNSRDQLERVLFDELGLPAIGKTEKTGKRSTSAAVLEALREAHPIVEKILQYRELTKLKSTYVDPLPDLIHPRTGRLHTRFNQTATATGRLSSSDPNLQNIPVRTPLGQRIRRAFIAEEGWLLVALDYSQIELRVLAHLSGDENLIRVFQEGRDIHTETASWMFGVPREAVDPLMRRAAKTINFGVLYGMSAHRLSQELAIPYEEAQAFIERYFQSFPKVRAWIEKTLEEGRRRGYVETLFGRRRYVPDLEARVKSVREAAERMAFNMPVQGTAADLMKLAMVKLFPRLEEMGARMLLQVHNELVLEAPKERAEAVARLAKEVMEGVYPLAVPLEVEVGIGEDWLSAKEHHHHHH

SEQ ID NO: 143 - DNA, 27 bp, Artificial Sequence
  Description of Artificial Sequence:  Synthetic
aagagcacctacgtggaccccttgccg

SEQ ID NO: 144 - DNA, 2517 bp, Artificial Sequence
  Description of Artificial Sequence:  Synthetic
atgaattcggggatgctgcccctctttgagcccaagggccgggtcctcctggtggacggccaccacctggcctaccgcaccttccacgccctgaagggcctcaccaccagccggggggagccggtgcaggcggtctacggcttcgccaagagcctcctcaaggccctcaaggaggacggggacgcggtgatcgtggtctttgacgccaaggccccctccttccgccacgaggcctacggggggtacaaggcgggccgggcccccacgccggaggactttccccggcaactcgccctcatcaaggagctggtggacctcctggggctggcgcgcctcgaggtcccgggctacgaggcggacgacgtcctggccagcctggccaagaaggcggaaaaggagggctacgaggtccgcatcctcaccgccgacaaagacctttaccagctcctttccgaccgcatccacgtcctccaccccgaggggtacctcatcaccccggcctggctttgggaaaagtacggcctgaggcccgaccagtgggccgactaccgggccctgaccggggacgagtccgacaaccttcccggggtcaagggcatcggggagaagacggcgaggaagcttctggaggagtgggggagcctggaagccctcctcaagaacctggaccggctgaagcccgccatccgggagaagatcctggcccacatggacgatctgaagctctcctgggacctggccaaggtgcgcaccgacctgcccctggaggtggacttcgccaaaaggcgggagcccgaccgggagaggcttagggcctttctggagaggcttgagtttggcagcctcctccacgagttcggccttctggaaagccccaaggccctggaggaggccccctggcccccgccggaaggggccttcgtgggctttgtgctttcccgcaaggagcccatgtgggccgatcttctggccctggccgccgccaggggcggccgcgtgcaccgggcagcagaccccttggcggggctaaaggacctcaaggaggtccggggcctcctcgccaaggacctcgccgtcttggcctcgagggaggggctagacctcgtgcccggggacgaccccatgctcctcgcctacctcctggacccttcgaacaccacccccgagggggtggcgcggcgctacgggggggagtggacggaggacgccgcccaccgggccctcctctcggagaggctccatcggaacctccttaagcgcctcgagggggaggagaagctcctttggctctaccacgaggtggaaaagcccctctcccgggtcctggcccatatggaggccacgggggtgcgcctggacgtggcctatctcagggccttgtccctggaggtggccgaggagatcgcccgcctcgaggccgaggtcttccgcctggccggccaccccttcaacctcaactcccgggaccagctggaaagggtcctctttgacgagctagggcttcccgccatcggcaagacggagaagaccggcaagcgctccaccagcgccgccgtcctggaggccctccgcgaggcccaccccatcgtggagaagatcctgcagtaccgggagctcaccaagctgaagagcacctacattgaccccttgccgagcctcgtccaccccaggacgggccgcctccacacccgcttcaaccagacggccacggccacgggcaggctaagtagctccgatcccaacctccagaacatccccgtccgcaccccgcttgggcagaggatccgccgggccttcatcgccgaggaggggtggctattggtggccctggactatagccagatagagctcagggtgctggcccacctctccggcgacgagaacctgatccgggtcttccaggaggggcgggacatccacacggagaccgccagctggatgttcggcgtcccccgggaggccgtggaccccctgatgcgccgggcggccaagaccatcaacttcggggtcctctacggcatgtcggcccaccgcctctcccaggagctagccatcccttacgaggaggcccaggccttcattgagcgctactttcagagcttccccaaggtgcgggcctggattgagaagaccctggaggagggcaggaggcgggggtacgtggagaccctcttcggccgccgccgctacgtgccagacctagaggcccgggtgaagagcgtgcgggaggcggccgagcgcatggccttcaacatgcccgtccagggcaccgccgccgacctcatgaagctggctatggtgaagctcttccccaggctggaggaaatgggggccaggatgctccttcaggtccacaacgagctggtcctcgaggccccaaaagagagggcggaggccgtggcccggctggccaaggaggtcatggagggggtgtatcccctggccgtgcccctggaggtggaggtggggataggggaggactggctctccgccaaggagcaccaccaccaccaccac

SEQ ID NO: 145 - protein, 839 aa, Artificial Sequence
  Description of Artificial Sequence:  Synthetic
MNSGMLPLFEPKGRVLLVDGHHLAYRTFHALKGLTTSRGEPVQAVYGFAKSLLKALKEDGDAVIVVFDAKAPSFRHEAYGGYKAGRAPTPEDFPRQLALIKELVDLLGLARLEVPGYEADDVLASLAKKAEKEGYEVRILTADKDLYQLLSDRIHVLHPEGYLITPAWLWEKYGLRPDQWADYRALTGDESDNLPGVKGIGEKTARKLLEEWGSLEALLKNLDRLKPAIREKILAHMDDLKLSWDLAKVRTDLPLEVDFAKRREPDRERLRAFLERLEFGSLLHEFGLLESPKALEEAPWPPPEGAFVGFVLSRKEPMWADLLALAAARGGRVHRAADPLAGLKDLKEVRGLLAKDLAVLASREGLDLVPGDDPMLLAYLLDPSNTTPEGVARRYGGEWTEDAAHRALLSERLHRNLLKRLEGEEKLLWLYHEVEKPLSRVLAHMEATGVRLDVAYLRALSLEVAEEIARLEAEVFRLAGHPFNLNSRDQLERVLFDELGLPAIGKTEKTGKRSTSAAVLEALREAHPIVEKILQYRELTKLKSTYIDPLPSLVHPRTGRLHTRFNQTATATGRLSSSDPNLQNIPVRTPLGQRIRRAFIAEEGWLLVALDYSQIELRVLAHLSGDENLIRVFQEGRDIHTETASWMFGVPREAVDPLMRRAAKTINFGVLYGMSAHRLSQELAIPYEEAQAFIERYFQSFPKVRAWIEKTLEEGRRRGYVETLFGRRRYVPDLEARVKSVREAAERMAFNMPVQGTAADLMKLAMVKLFPRLEEMGARMLLQVHNELVLEAPKERAEAVARLAKEVMEGVYPLAVPLEVEVGIGEDWLSAKEHHHHHH

SEQ ID NO: 146 - DNA, 39 bp, Artificial Sequence
  Description of Artificial Sequence:  Synthetic
attgaccccttgccgagcctcgtccaccccaggacgggc

SEQ ID NO: 147 - DNA, 2517 bp, Artificial Sequence
  Description of Artificial Sequence:  Synthetic
atgaattcggggatgctgcccctctttgagcccaagggccgggtcctcctggtggacggccaccacctggcctaccgcaccttccacgccctgaagggcctcaccaccagccggggggagccggtgcaggcggtctacggcttcgccaagagcctcctcaaggccctcaaggaggacggggacgcggtgatcgtggtctttgacgccaaggccccctccttccgccacgaggcctacggggggtacaaggcgggccgggcccccacgccggaggactttccccggcaactcgccctcatcaaggagctggtggacctcctggggctggcgcgcctcgaggtcccgggctacgaggcggacgacgtcctggccagcctggccaagaaggcggaaaaggagggctacgaggtccgcatcctcaccgccgacaaagacctttaccagctcctttccgaccgcatccacgtcctccaccccgaggggtacctcatcaccccggcctggctttgggaaaagtacggcctgaggcccgaccagtgggccgactaccgggccctgaccggggacgagtccgacaaccttcccggggtcaagggcatcggggagaagacggcgaggaagcttctggaggagtgggggagcctggaagccctcctcaagaacctggaccggctgaagcccgccatccgggagaagatcctggcccacatggacgatctgaagctctcctgggacctggccaaggtgcgcaccgacctgcccctggaggtggacttcgccaaaaggcgggagcccgaccgggagaggcttagggcctttctggagaggcttgagtttggcagcctcctccacgagttcggccttctggaaagccccaaggccctggaggaggccccctggcccccgccggaaggggccttcgtgggctttgtgctttcccgcaaggagcccatgtgggccgatcttctggccctggccgccgccaggggcggccgcgtccaccgggcccccgagccttataaagccctcagggacctgaaggaggcgcgggggcttctcgccaaagacctgagcgttctggccctgagggaaggccttggcctcccgcccggcgacgaccccatgctcctcgcctacctcctggacccttcgaacaccacccccgagggggtggcccggcgctacggcggggagtggacggaggaggcgggggagcgggccgccctttccgagaggctcttcgccaacctgcttaagaggcttgagggggaggagaggctcctttggctttaccgggaggtggagaggcccctttccgctgtcctggcccatatggaggccacgggggtgcgcctggacgtggcctatctcagggccttgtccctggaggtggccgaggagatcgcccgcctcgaggccgaggtcttccgcctggccggccaccccttcaacctcaactcccgggaccagctggaaagggtcctctttgacgagctagggcttcccgccatcggcaagacgcaaaagaccggcaagcgctccaccagcgccgccgtcctggaggccctccgcgaggcccaccccatcgtggagaagatcctgcagtaccgggagctcaccaagctgaagagcacctacattgaccccttgccggacctcatccaccccaggacgggccgcctccacacccgcttcaaccagacggccacggccacgggcaggctaagtagctccgatcccaacctccagaacatccccgtccgcaccccgcttgggcagaggatccgccgggccttcatcgccgaggaggggtggctattggtggccctggactatagccagatagagctcagggtgctggcccacctctccggcgacgagaacctgatccgggtcttccaggaggggcgggacatccacacggagaccgccagctggatgttcggcgtcccccgggaggccgtggaccccctgatgcgccgggcggccaagaccatcaacttcggggtcctctacggcatgtcggcccaccgcctctcccaggagctagccatcccttacgaggaggcccaggccttcattgagcgctactttcagagcttccccaaggtgcgggcctggattgagaagaccctggaggagggcaggaggcgggggtacgtggagaccctcttcggccgccgccgctacgtgccagacctagaggcccgggtgaagagcgtgcgggaggcggccgagcgcatggccttcaacatgcccgtccagggcaccgccgccgacctcatgaagctggctatggtgaagctcttccccaggctggaggaaatgggggccaggatgctccttcaggtccacaacgagctggtcctcgaggccccaaaagagagggcggaggccgtggcccggctggccaaggaggtcatggagggggtgtatcccctggccgtgcccctggaggtggaggtggggataggggaggactggctctccgccaaggagcaccaccaccaccaccac

SEQ ID NO: 148 - protein, 839 aa, Artificial Sequence
  Description of Artificial Sequence:  Synthetic
MNSGMLPLFEPKGRVLLVDGHHLAYRTFHALKGLTTSRGEPVQAVYGFAKSLLKALKEDGDAVIVVFDAKAPSFRHEAYGGYKAGRAPTPEDFPRQLALIKELVDLLGLARLEVPGYEADDVLASLAKKAEKEGYEVRILTADKDLYQLLSDRIHVLHPEGYLITPAWLWEKYGLRPDQWADYRALTGDESDNLPGVKGIGEKTARKLLEEWGSLEALLKNLDRLKPAIREKILAHMDDLKLSWDLAKVRTDLPLEVDFAKRREPDRERLRAFLERLEFGSLLHEFGLLESPKALEEAPWPPPEGAFVGFVLSRKEPMWADLLALAAARGGRVHRAPEPYKALRDLKEARGLLAKDLSVLALREGLGLPPGDDPMLLAYLLDPSNTTPEGVARRYGGEWTEEAGERAALSERLFANLLKRLEGEERLLWLYREVERPLSAVLAHMEATGVRLDVAYLRALSLEVAEEIARLEAEVFRLAGHPFNLNSRDQLERVLFDELGLPAIGKTQKTGKRSTSAAVLEALREAHPIVEKILQYRELTKLKSTYIDPLPDLIHPRTGRLHTRFNQTATATGRLSSSDPNLQNIPVRTPLGQRIRRAFIAEEGWLLVALDYSQIELRVLAHLSGDENLIRVFQEGRDIHTETASWMFGVPREAVDPLMRRAAKTINFGVLYGMSAHRLSQELAIPYEEAQAFIERYFQSFPKVRAWIEKTLEEGRRRGYVETLFGRRRYVPDLEARVKSVREAAERMAFNMPVQGTAADLMKLAMVKLFPRLEEMGARMLLQVHNELVLEAPKERAEAVARLAKEVMEGVYPLAVPLEVEVGIGEDWLSAKEHHHHHH

SEQ ID NO: 149 - DNA, 2517 bp, Artificial Sequence
  Description of Artificial Sequence:  Synthetic
atgaattcggggatgctgcccctctttgagcccaagggccgggtcctcctggtggacggccaccacctggcctaccgcaccttccacgccctgaagggcctcaccaccagccggggggagccggtgcaggcggtctacggcttcgccaagagcctcctcaaggccctcaaggaggacggggacgcggtgatcgtggtctttgacgccaaggccccctccttccgccacgaggcctacggggggtacaaggcgggccgggcccccacgccggaggactttccccggcaactcgccctcatcaaggagctggtggacctcctggggctggcgcgcctcgaggtcccgggctacgaggcggacgacgtcctggccagcctggccaagaaggcggaaaaggagggctacgaggtccgcatcctcaccgccgacaaagacctttaccagctcctttccgaccgcatccacgtcctccaccccgaggggtacctcatcaccccggcctggctttgggaaaagtacggcctgaggcccgaccagtgggccgactaccgggccctgaccggggacgagtccgacaaccttcccggggtcaagggcatcggggagaagacggcgaggaagcttctggaggagtgggggagcctggaagccctcctcaagaacctggaccggctgaagcccgccatccgggagaagatcctggcccacatggacgatctgaagctctcctgggacctggccaaggtgcgcaccgacctgcccctggaggtggacttcgccaaaaggcgggagcccgaccgggagaggcttagggcctttctggagaggcttgagtttggcagcctcctccacgagttcggccttctggaaagccccaaggccctggaggaggccccctggcccccgccggaaggggccttcgtgggctttgtgctttcccgcaaggagcccatgtgggccgatcttctggccctggccgccgccaggggcggccgcgtccaccgggcccccgagccttataaagccctcagggacctgaaggaggcgcgggggcttctcgccaaagacctgagcgttctggccctgagggaaggccttggcctcccgcccggcgacgaccccatgctcctcgcctacctcctggacccttcgaacaccacccccgagggggtggcccggcgctacggcggggagtggacggaggaggcgggggagcgggccgccctttccgagaggctcttcgccaacctgcttgggaggcttgagggggaggagaggctcctttggctttaccgggaggtggagaggcccctttccgctgtcctggcccatatggaggccacgggggtgcgcctggacgtggcctatctcagggccttgtccctggaggtggccgaggagatcgcccgcctcgaggccgaggtcttccgcctggccggccaccccttcaacctcaactcccgggaccagctggaaagggtcctctttgacgagctagggcttcccgccatcggcaagacgcaaaagaccggcaagcgctccaccagcgccgccgtcctggaggccctccgcgaggcccaccccatcgtggagaagatcctgcagtaccgggagctcaccaagctgaagagcacctacattgaccccttgccggacctcatccaccccaggacgggccgcctccacacccgcttcaaccagacggccacggccacgggcaggctaagtagctccgatcccaacctccagaacatccccgtccgcaccccgcttgggcagaggatccgccgggccttcatcgccgaggaggggtggctattggtggccctggactatagccagatagagctcagggtgctggcccacctctccggcgacgagaacctgatccgggtcttccaggaggggcgggacatccacacggagaccgccagctggatgttcggcgtcccccgggaggccgtggaccccctgatgcgccgggcggccaagaccatcaacttcggggtcctctacggcatgtcggcccaccgcctctcccaggagctagccatcccttacgaggaggcccaggccttcattgagcgctactttcagagcttccccaaggtgcgggcctggattgagaagaccctggaggagggcaggaggcgggggtacgtggagaccctcttcggccgccgccgctacgtgccagacctagaggcccgggtgaagagcgtgcgggaggcggccgagcgcatggccttcaacatgcccgtccagggcaccgccgccgacctcatgaagctggctatggtgaagctcttccccaggctggaggaaatgggggccaggatgctccttcaggtccacaacgagctggtcctcgaggccccaaaagagagggcggaggccgtggcccggctggccaaggaggtcatggagggggtgtatcccctggccgtgcccctggaggtggaggtggggataggggaggactggctctccgccaaggagcaccaccaccaccaccac

SEQ ID NO: 150 - protein, 839 aa, Artificial Sequence
  Description of Artificial Sequence:  Synthetic
MNSGMLPLFEPKGRVLLVDGHHLAYRTFHALKGLTTSRGEPVQAVYGFAKSLLKALKEDGDAVIVVFDAKAPSFRHEAYGGYKAGRAPTPEDFPRQLALIKELVDLLGLARLEVPGYEADDVLASLAKKAEKEGYEVRILTADKDLYQLLSDRIHVLHPEGYLITPAWLWEKYGLRPDQWADYRALTGDESDNLPGVKGIGEKTARKLLEEWGSLEALLKNLDRLKPAIREKILAHMDDLKLSWDLAKVRTDLPLEVDFAKRREPDRERLRAFLERLEFGSLLHEFGLLESPKALEEAPWPPPEGAFVGFVLSRKEPMWADLLALAAARGGRVHRAPEPYKALRDLKEARGLLAKDLSVLALREGLGLPPGDDPMLLAYLLDPSNTTPEGVARRYGGEWTEEAGERAALSERLFANLLGRLEGEERLLWLYREVERPLSAVLAHMEATGVRLDVAYLRALSLEVAEEIARLEAEVFRLAGHPFNLNSRDQLERVLFDELGLPAIGKTQKTGKRSTSAAVLEALREAHPIVEKILQYRELTKLKSTYIDPLPDLIHPRTGRLHTRFNQTATATGRLSSSDPNLQNIPVRTPLGQRIRRAFIAEEGWLLVALDYSQIELRVLAHLSGDENLIRVFQEGRDIHTETASWMFGVPREAVDPLMRRAAKTINFGVLYGMSAHRLSQELAIPYEEAQAFIERYFQSFPKVRAWIEKTLEEGRRRGYVETLFGRRRYVPDLEARVKSVREAAERMAFNMPVQGTAADLMKLAMVKLFPRLEEMGARMLLQVHNELVLEAPKERAEAVARLAKEVMEGVYPLAVPLEVEVGIGEDWLSAKEHHHHHH

SEQ ID NO: 151 - DNA, 33 bp, Artificial Sequence
  Description of Artificial Sequence:  Synthetic
ttcgccaacctgcttgggaggcttgagggggag

SEQ ID NO: 152 - DNA, 2517 bp, Artificial Sequence
  Description of Artificial Sequence:  Synthetic
atgaattcggggatgctgcccctctttgagcccaagggccgggtcctcctggtggacggccaccacctggcctaccgcaccttccacgccctgaagggcctcaccaccagccggggggagccggtgcaggcggtctacggcttcgccaagagcctcctcaaggccctcaaggaggacggggacgcggtgatcgtggtctttgacgccaaggccccctccttccgccacgaggcctacggggggtacaaggcgggccgggcccccacgccggaggactttccccggcaactcgccctcatcaaggagctggtggacctcctggggctggcgcgcctcgaggtcccgggctacgaggcggacgacgtcctggccagcctggccaagaaggcggaaaaggagggctacgaggtccgcatcctcaccgccgacaaagacctttaccagctcctttccgaccgcatccacgtcctccaccccgaggggtacctcatcaccccggcctggctttgggaaaagtacggcctgaggcccgaccagtgggccgactaccgggccctgaccggggacgagtccgacaaccttcccggggtcaagggcatcggggagaagacggcgaggaagcttctggaggagtgggggagcctggaagccctcctcaagaacctggaccggctgaagcccgccatccgggagaagatcctggcccacatggacgatctgaagctctcctgggacctggccaaggtgcgcaccgacctgcccctggaggtggacttcgccaaaaggcgggagcccgaccgggagaggcttagggcctttctggagaggcttgagtttggcagcctcctccacgagttcggccttctggaaagccccaaggccctggaggaggccccctggcccccgccggaaggggccttcgtgggctttgtgctttcccgcaaggagcccatgtgggccgatcttctggccctggccgccgccaggggcggccgcgtccaccgggcccccgagccttataaagccctcagggacctgaaggaggcgcgggggcttctcgccaaagacctgagcgttctggccctgagggaaggccttggcctcccgcccggcgacgaccccatgctcctcgcctacctcctggacccttcgaacaccacccccgagggggtggcccggcgctacggcggggagtggacggaggaggcgggggagcgggccgccctttccgagaggctcttcgccaacctgtggaagaggcttgagggggaggagaggctcctttggctttaccgggaggtggagaggcccctttccgctgtcctggcccatatggaggccacgggggtgcgcctggacgtggcctatctcagggccttgtccctggaggtggccgaggagatcgcccgcctcgaggccgaggtcttccgcctggccggccaccccttcaacctcaactcccgggaccagctggaaagggtcctctttgacgagctagggcttcccgccatcggcaagacgcaaaagaccggcaagcgctccaccagcgccgccgtcctggaggccctccgcgaggcccaccccatcgtggagaagatcctgcagtaccgggagctcaccaagctgaagagcacctacattgaccccttgccggacctcatccaccccaggacgggccgcctccacacccgcttcaaccagacggccacggccacgggcaggctaagtagctccgatcccaacctccagaacatccccgtccgcaccccgcttgggcagaggatccgccgggccttcatcgccgaggaggggtggctattggtggccctggactatagccagatagagctcagggtgctggcccacctctccggcgacgagaacctgatccgggtcttccaggaggggcgggacatccacacggagaccgccagctggatgttcggcgtcccccgggaggccgtggaccccctgatgcgccgggcggccaagaccatcaacttcggggtcctctacggcatgtcggcccaccgcctctcccaggagctagccatcccttacgaggaggcccaggccttcattgagcgctactttcagagcttccccaaggtgcgggcctggattgagaagaccctggaggagggcaggaggcgggggtacgtggagaccctcttcggccgccgccgctacgtgccagacctagaggcccgggtgaagagcgtgcgggaggcggccgagcgcatggccttcaacatgcccgtccagggcaccgccgccgacctcatgaagctggctatggtgaagctcttccccaggctggaggaaatgggggccaggatgctccttcaggtccacaacgagctggtcctcgaggccccaaaagagagggcggaggccgtggcccggctggccaaggaggtcatggagggggtgtatcccctggccgtgcccctggaggtggaggtggggataggggaggactggctctccgccaaggagcaccaccaccaccaccac

SEQ ID NO: 153 - protein, 839 aa, Artificial Sequence
  Description of Artificial Sequence:  Synthetic
MNSGMLPLFEPKGRVLLVDGHHLAYRTFHALKGLTTSRGEPVQAVYGFAKSLLKALKEDGDAVIVVFDAKAPSFRHEAYGGYKAGRAPTPEDFPRQLALIKELVDLLGLARLEVPGYEADDVLASLAKKAEKEGYEVRILTADKDLYQLLSDRIHVLHPEGYLITPAWLWEKYGLRPDQWADYRALTGDESDNLPGVKGIGEKTARKLLEEWGSLEALLKNLDRLKPAIREKILAHMDDLKLSWDLAKVRTDLPLEVDFAKRREPDRERLRAFLERLEFGSLLHEFGLLESPKALEEAPWPPPEGAFVGFVLSRKEPMWADLLALAAARGGRVHRAPEPYKALRDLKEARGLLAKDLSVLALREGLGLPPGDDPMLLAYLLDPSNTTPEGVARRYGGEWTEEAGERAALSERLFANLWKRLEGEERLLWLYREVERPLSAVLAHMEATGVRLDVAYLRALSLEVAEEIARLEAEVFRLAGHPFNLNSRDQLERVLFDELGLPAIGKTQKTGKRSTSAAVLEALREAHPIVEKILQYRELTKLKSTYIDPLPDLIHPRTGRLHTRFNQTATATGRLSSSDPNLQNIPVRTPLGQRIRRAFIAEEGWLLVALDYSQIELRVLAHLSGDENLIRVFQEGRDIHTETASWMFGVPREAVDPLMRRAAKTINFGVLYGMSAHRLSQELAIPYEEAQAFIERYFQSFPKVRAWIEKTLEEGRRRGYVETLFGRRRYVPDLEARVKSVREAAERMAFNMPVQGTAADLMKLAMVKLFPRLEEMGARMLLQVHNELVLEAPKERAEAVARLAKEVMEGVYPLAVPLEVEVGIGEDWLSAKEHHHHHH

SEQ ID NO: 154 - DNA, 33 bp, Artificial Sequence
  Description of Artificial Sequence:  Synthetic
ctcttcgccaacctgtggaagaggcttgagggg

SEQ ID NO: 155 - protein, 835 aa, Artificial Sequence
  Description of Artificial Sequence:  Synthetic
MEFTPLFDLEEPPKRVLLVDGHHLAYRTFYALSLTTSRGEPVQMVYGFARSLLKALKEDGQAVVVVFDAKAPSFRHEAYEAYKAGRAPTPEDFPRQLALVKRLVDLLGLVRLEAPGYEADDVLGTLAKKAEREGMEVRILTGDRDFFQLLSEKVSVLLPDGTLVTPKDVQEKYGVPPERWVDFRALTGDRSDNIPGVAGIGEKTALRLLAEWGSVENLLKNLDRVKPDSLRRKIEAHLEDLHLSLDLARIRTDLPLEVDFKALRRRTPDLEGLRAFLEELEFGSLLHEFGLLGGEKPREEAPWPPPEGAFVGFLLSRKEPMWAELLALAAASEGRVHRATSPVEALADLKEARGFLAKDLAVLALREGVALDPTDDPLLVAYLLDPANTHPEGVARRYGGEFTEDAAERALLSERLFQNLFPRLSEKLLWLYQEVERPLSRVLAHMEARGVRLDVPLLEALSFELEKEMERLEGEVFRLAGHPFNLNSRDQLERVLFDELGLTPVGRTEKTGKRSTAQGALEALRGAHPIVELILQYRELSKLKSTYLDPLPRLVHPRTGRLHTRFNQTATATGRLSSSDPNLQNIPVRTPLGQRIRKAFVAEEGWLLLAADYSQIELRVLAHLSGDENLKRVFREGKDIHTETAAWMFGLDPALVDPKMRRAAKTVNFGVLYGMSAHRLSQELGIDYKEAEAFIERYFQSFPKVRAWIERTLEEGRTRGYVETLFGRRRYVPDLASRVRSVREAAERMAFNMPVQGTAADLMKIAMVKLFPRLKPLGAHLLLQVHDELVLEVPEDRAEEAKALVKEVMENAYPLDVPLEVEVGVGRDWLEAKQD

SEQ ID NO: 156 - DNA, 2526 bp, Artificial Sequence
  Description of Artificial Sequence:  Synthetic
atgaattccgaggcgatgcttccgctctttgaacccaaaggccgggtcctcctggtggacggccaccacctggcctaccgcaccttcttcgccctgaagggcctcaccacgagccggggcgaaccggtgcaggcggtctacggcttcgccaagagcctcctcaaggccctgaaggaggacgggtacaaggccgtcttcgtggtctttgacgccaaggccccctccttccgccacgaggcctacgaggcctacaaggcggggagggccccgacccccgaggacttcccccggcagctcgccctcatcaaggagctggtggacctcctggggtttacccgcctcgaggtccccggctacgaggcggacgacgttctcgccaccctggccaagaaggcggaaaaggaggggtacgaggtgcgcatcctcaccgccgaccgcgacctctaccaactcgtctccgaccgcgtcgccgtcctccaccccgagggccacctcatcaccccggagtggctttgggagaagtacggcctcaggccggagcagtgggtggacttccgcgccctcgtgggggacccctccgacaacctccccggggtcaagggcatcggggagaagaccgccctcaagctcctcaaggagtggggaagcctggaaaacctcctcaagaacctggaccgggtaaagccagaaaacgtccgggagaagatcaaggcccacctggaagacctcaggctctccttggagctctcccgggtgcgcaccgacctccccctggaggtggacctcgcccaggggcgggagcccgaccgggaggggcttagggccttcctggagaggctggagttcggcagcctcctccacgagttcggcctcctggaggcccccgcccccctggaggaggccccctggcccccgccggaaggggccttcgtgggcttcgtcctctcccgccccgagcccatgtgggcggagcttaaagccctggccgcctgcagggacggccgggtgcaccgggcagcagaccccttggcggggctaaaggacctcaaggaggtccggggcctcctcgccaaggacctcgccgtcttggcctcgagggaggggctagacctcgtgcccggggacgaccccatgctcctcgcctacctcctggacccttcgaacaccacccccgagggggtggcgcggcgctacgggggggagtggacggaggacgccgcccaccgggccctcctctcggagaggctccatcggaacctccttaagcgcctcgagggggaggagaagctcctttggctctaccacgaggtggaaaagcccctctcccgggtcctggcccatatggaggccaccggggtacggcgggacgtggcctaccttcaggccctttccctggagcttgcggaggagatccgccgcctcgaggaggaggtcttccgcttggcgggccaccccttcaacctcaactcccgggaccagctggaaagggtgctctttgacgagcttaggcttcccgccttggggaagacgcaaaagacaggcaagcgctccaccagcgccgcggtgctggaggccctacgggaggcccaccccatcgtggagaagatcctccagcaccgggagctcaccaagctcaagaacacctacgtggaccccctcccaagcctcgtccacccgaggacgggccgcctccacacccgcttcaaccagacggccacggccacggggaggcttagtagctccgaccccaacctgcagaacatccccgtccgcacccccttgggccagaggatccgccgggccttcgtggccgaggcgggttgggcgttggtggccctggactatagccagatagagctccgcgtcctcgcccacctctccggggacgaaaacctgatcagggtcttccaggaggggaaggacatcgccacccagaccgcaagctggatgttcggcgtccccccggaggccgtggaccccctgatgcgccgggcggccaagacggtgaacttcggcgtcctctacggcatgtccgcccataggctctcccaggagcttgccatcccctacgaggaggcggtggcctttatagagcgctacttccaaagcttccccaaggtgcgggcctggatagaaaagaccctggaggaggggaggaagcggggctacgtggaaaccctcttcggaagaaggcgctacgtgcccgacctcaacgcccgggtgaagagcgtcagggaggccgcggagcgcatggccttcaacatgcccgtccagggcaccgccgccgacctcatgaagctcgccatggtgaagctcttcccccgcctccgggagatgggggcccgcatgctcctccaggtccacaacgagctcctcctggaggccccccaagcgcgggccgaggaggtggcggctttggccaaggaggccatggagaaggcctatcccctcgccgtgcccctggaggtggaggtggggatgggggaggactggctttccgccaagggtcaccaccaccaccaccac

SEQ ID NO: 157 - protein, 842 aa, Artificial Sequence
  Description of Artificial Sequence:  Synthetic
MNSEAMLPLFEPKGRVLLVDGHHLAYRTFFALKGLTTSRGEPVQAVYGFAKSLLKALKEDGYKAVFVVFDAKAPSFRHEAYEAYKAGRAPTPEDFPRQLALIKELVDLLGFTRLEVPGYEADDVLATLAKKAEKEGYEVRILTADRDLYQLVSDRVAVLHPEGHLITPEWLWEKYGLRPEQWVDFRALVGDPSDNLPGVKGIGEKTALKLLKEWGSLENLLKNLDRVKPENVREKIKAHLEDLRLSLELSRVRTDLPLEVDLAQGREPDREGLRAFLERLEFGSLLHEFGLLEAPAPLEEAPWPPPEGAFVGFVLSRPEPMWAELKALAACRDGRVHRAADPLAGLKDLKEVRGLLAKDLAVLASREGLDLVPGDDPMLLAYLLDPSNTTPEGVARRYGGEWTEDAAHRALLSERLHRNLLKRLEGEEKLLWLYHEVEKPLSRVLAHMEATGVRRDVAYLQALSLELAEEIRRLEEEVFRLAGHPFNLNSRDQLERVLFDELRLPALGKTQKTGKRSTSAAVLEALREAHPIVEKILQHRELTKLKNTYVDPLPSLVHPRTGRLHTRFNQTATATGRLSSSDPNLQNIPVRTPLGQRIRRAFVAEAGWALVALDYSQIELRVLAHLSGDENLIRVFQEGKDIATQTASWMFGVPPEAVDPLMRRAAKTVNFGVLYGMSAHRLSQELAIPYEEAVAFIERYFQSFPKVRAWIEKTLEEGRKRGYVETLFGRRRYVPDLNARVKSVREAAERMAFNMPVQGTAADLMKLAMVKLFPRLREMGARMLLQVHNELLLEAPQARAEEVAALAKEAMEKAYPLAVPLEVEVGMGEDWLSAKGHHHHHH

SEQ ID NO: 158 - DNA, 33 bp, Artificial Sequence
  Description of Artificial Sequence:  Synthetic
gcttgcggtctgggtggcgatgtccttcccctc

SEQ ID NO: 159 - DNA, 2526 bp, Artificial Sequence
  Description of Artificial Sequence:  Synthetic
atgaattccgaggcgatgcttccgctctttgaacccaaaggccgggtcctcctggtggacggccaccacctggcctaccgcaccttcttcgccctgaagggcctcaccacgagccggggcgaaccggtgcaggcggtctacggcttcgccaagagcctcctcaaggccctgaaggaggacgggtacaaggccgtcttcgtggtctttgacgccaaggccccctccttccgccacgaggcctacgaggcctacaaggcggggagggccccgacccccgaggacttcccccggcagctcgccctcatcaaggagctggtggacctcctggggtttacccgcctcgaggtccccggctacgaggcggacgacgttctcgccaccctggccaagaaggcggaaaaggaggggtacgaggtgcgcatcctcaccgccgaccgcgacctctaccaactcgtctccgaccgcgtcgccgtcctccaccccgagggccacctcatcaccccggagtggctttgggagaagtacggcctcaggccggagcagtgggtggacttccgcgccctcgtgggggacccctccgacaacctccccggggtcaagggcatcggggagaagaccgccctcaagctcctcaaggagtggggaagcctggaaaacctcctcaagaacctggaccgggtaaagccagaaaacgtccgggagaagatcaaggcccacctggaagacctcaggctctccttggagctctcccgggtgcgcaccgacctccccctggaggtggacctcgcccaggggcgggagcccgaccgggaggggcttagggccttcctggagaggctggagttcggcagcctcctccacgagttcggcctcctggaggcccccgcccccctggaggaggccccctggcccccgccggaaggggccttcgtgggcttcgtcctctcccgccccgagcccatgtgggcggagcttaaagccctggccgcctgcaggggcggccgcgtgcaccgggcagcagaccccttggcggggctaaaggacctcaaggaggtccggggcctcctcgccaaggacctcgccgtcttggcctcgagggaggggctagacctcgtgcccggggacgaccccatgctcctcgcctacctcctggacccttcgaacaccacccccgagggggtggcgcggcgctacgggggggagtggacggaggacgccgcccaccgggccctcctctcggagaggctccatcggaacctccttaagcgcctcgagggggaggagaagctcctttggctctaccacgaggtggaaaagcccctctcccgggtcctggcccatatggaggccaccggggtacggcgggacgtggcctaccttcaggccctttccctggagcttgcggaggagatccgccgcctcgaggaggaggtcttccgcttggcgggccaccccttcaacctcaactcccgggaccagctggaaagggtgctctttgacgagcttaggcttcccgccttggggaagacgcaaaagacaggcaagcgctccaccagcgccgcggtgctggaggccctacgggaggcccaccccatcgtggagaagatcctccagcaccgggagctcaccaagctcaagaacacctacgtggaccccctcccaagcctcgtccacccgaggacgggccgcctccacacccgcttcaaccagacggccacggccacggggaggcttagtagctccgaccccaacctgcagaacatccccgtccgcacccccttgggccagaggatccgccgggccttcgtggccgaggcgggttgggcgttggtggccctggactatagccagatagagctccgcgtcctcgcccacctctccggggacgaaaacctgatcagggtcttccaggaggggaaggacatccacacccagaccgcaagctggatgttcggcgtccccccggaggccgtggaccccctgatgcgccgggcggccaagacggtgaacttcggcgtcctctacggcatgtccgcccataggctctcccaggagcttgccatcccctacgaggaggcggtggcctttatagagcgctacttccaaagcttccccaaggtgcgggcctggatagaaaagaccctggaggaggggaggaagcggggctacgtggaaaccctcttcggaagaaggcgctacgtgcccgacctcaacgcccgggtgaagagcgtcagggaggccgcggaggccatggccttcaacatgcccgtccagggcaccgccgccgacctcatgaagctcgccatggtgaagctcttcccccgcctccgggagatgggggcccgcatgctcctccaggtccacaacgagctcctcctggaggccccccaagcgcgggccgaggaggtggcggctttggccaaggaggccatggagaaggcctatcccctcgccgtgcccctggaggtggaggtggggatgggggaggactggctttccgccaagggtcaccaccaccaccaccac

SEQ ID NO: 160 - protein, 842 aa, Artificial Sequence
  Description of Artificial Sequence:  Synthetic
MNSEAMLPLFEPKGRVLLVDGHHLAYRTFFALKGLTTSRGEPVQAVYGFAKSLLKALKEDGYKAVFVVFDAKAPSFRHEAYEAYKAGRAPTPEDFPRQLALIKELVDLLGFTRLEVPGYEADDVLATLAKKAEKEGYEVRILTADRDLYQLVSDRVAVLHPEGHLITPEWLWEKYGLRPEQWVDFRALVGDPSDNLPGVKGIGEKTALKLLKEWGSLENLLKNLDRVKPENVREKIKAHLEDLRLSLELSRVRTDLPLEVDLAQGREPDREGLRAFLERLEFGSLLHEFGLLEAPAPLEEAPWPPPEGAFVGFVLSRPEPMWAELKALAACRGGRVHRAADPLAGLKDLKEVRGLLAKDLAVLASREGLDLVPGDDPMLLAYLLDPSNTTPEGVARRYGGEWTEDAAHRALLSERLHRNLLKRLEGEEKLLWLYHEVEKPLSRVLAHMEATGVRRDVAYLQALSLELAEEIRRLEEEVFRLAGHPFNLNSRDQLERVLFDELRLPALGKTQKTGKRSTSAAVLEALREAHPIVEKILQHRELTKLKNTYVDPLPSLVHPRTGRLHTRFNQTATATGRLSSSDPNLQNIPVRTPLGQRIRRAFVAEAGWALVALDYSQIELRVLAHLSGDENLIRVFQEGKDIHTQTASWMFGVPPEAVDPLMRRAAKTVNFGVLYGMSAHRLSQELAIPYEEAVAFIERYFQSFPKVRAWIEKTLEEGRKRGYVETLFGRRRYVPDLNARVKSVREAAEAMAFNMPVQGTAADLMKLAMVKLFPRLREMGARMLLQVHNELLLEAPQARAEEVAALAKEAMEKAYPLAVPLEVEVGMGEDWLSAKGHHHHHH

SEQ ID NO: 161 - DNA, 33 bp, Artificial Sequence
  Description of Artificial Sequence:  Synthetic
catgttgaaggccatggcctccgcggcctccct

SEQ ID NO: 162 - DNA, 2526 bp, Artificial Sequence
  Description of Artificial Sequence:  Synthetic
atgaattccgaggcgatgcttccgctctttgaacccaaaggccgggtcctcctggtggacggccaccacctggcctaccgcaccttcttcgccctgaagggcctcaccacgagccggggcgaaccggtgcaggcggtctacggcttcgccaagagcctcctcaaggccctgaaggaggacgggtacaaggccgtcttcgtggtctttgacgccaaggccccctccttccgccacgaggcctacgaggcctacaaggcggggagggccccgacccccgaggacttcccccggcagctcgccctcatcaaggagctggtggacctcctggggtttacccgcctcgaggtccccggctacgaggcggacgacgttctcgccaccctggccaagaaggcggaaaaggaggggtacgaggtgcgcatcctcaccgccgaccgcgacctctaccaactcgtctccgaccgcgtcgccgtcctccaccccgagggccacctcatcaccccggagtggctttgggagaagtacggcctcaggccggagcagtgggtggacttccgcgccctcgtgggggacccctccgacaacctccccggggtcaagggcatcggggagaagaccgccctcaagctcctcaaggagtggggaagcctggaaaacctcctcaagaacctggaccgggtaaagccagaaaacgtccgggagaagatcaaggcccacctggaagacctcaggctctccttggagctctcccgggtgcgcaccgacctccccctggaggtggacctcgcccaggggcgggagcccgaccgggaggggcttagggccttcctggagaggctggagttcggcagcctcctccacgagttcggcctcctggaggcccccgcccccctggaggaggccccctggcccccgccggaaggggccttcgtgggcttcgtcctctcccgccccgagcccatgtgggcggagcttaaagccctggccgcctgcaggggcggccgcgtgcaccgggcagcagaccccttggcggggctaaaggacctcaaggaggtccggggcctcctcgccaaggacctcgccgtcttggcctcgagggaggggctagacctcgtgcccggggacgaccccatgctcctcgcctacctcctggacccttcgaacaccacccccgagggggtggcgcggcgctacgggggggagtggacggaggacgccgcccaccgggccctcctctcggagaggctccatcggaacctccttaagcgcctcgagggggaggagaagctcctttggctctaccacgaggtggaaaagcccctctcccgggtcctggcccatatggaggccaccggggtacggcgggacgtggcctaccttcaggccctttccctggagcttgcggaggagatccgccgcctcgaggaggaggtcttccgcttggcgggccaccccttcaacctcaactcccgggaccagctggaaagggtgctctttgacgagcttaggcttcccgccttggggaagacgcaaaagacaggcaagcgctccaccagcgccgcggtgctggaggccctacgggaggcccaccccatcgtggagaagatcctccagcaccgggagctcaccaagctcaagaacacctacgtggaccccctcccaagcctcgtccacccgaggacgggccgcctccacacccgcttcaaccagacggccacggccacggggaggcttagtagctccgaccccaacctgcagaacatccccgtccgcacccccttgggccagaggatccgccgggccttcgtggccgaggcgggttgggcgttggtggccctggactatagccagatagagctccgcgtcctcgcccacctctccggggacgaaaacctgatcagggtcttccaggaggggaaggacatccacacccagaccgcaagctggatgttcggcgtccccccggaggccgtggaccccctgatgcgccgggcggccaagacggtgaacttcggcgtcctctacggcatgtccgcccataggctctcccaggagcttgccatcccctacgaggaggcggtggcctttatagagcgctacttccaaagcttccccaaggtgcgggcctggatagaaaagaccctggaggaggggaggaagcggggctacgtggaaaccctcttcggaagaaggcgctacgtgcccgacctcaacgcccgggtgaagagcgtcagggaggccgcggagcgcatggccttcaacatgcccgtccagggcaccgccgccgacctcatgaagctcgccatggtgaagctcttcccccgcctccgggagatgggggcccgcatgctcctccaggtcgccaacgagctcctcctggaggccccccaagcgcgggccgaggaggtggcggctttggccaaggaggccatggagaaggcctatcccctcgccgtgcccctggaggtggaggtggggatgggggaggactggctttccgccaagggtcaccaccaccaccaccac

SEQ ID NO: 163 - protein, 842 aa, Artificial Sequence
  Description of Artificial Sequence:  Synthetic
MNSEAMLPLFEPKGRVLLVDGHHLAYRTFFALKGLTTSRGEPVQAVYGFAKSLLKALKEDGYKAVFVVFDAKAPSFRHEAYEAYKAGRAPTPEDFPRQLALIKELVDLLGFTRLEVPGYEADDVLATLAKKAEKEGYEVRILTADRDLYQLVSDRVAVLHPEGHLITPEWLWEKYGLRPEQWVDFRALVGDPSDNLPGVKGIGEKTALKLLKEWGSLENLLKNLDRVKPENVREKIKAHLEDLRLSLELSRVRTDLPLEVDLAQGREPDREGLRAFLERLEFGSLLHEFGLLEAPAPLEEAPWPPPEGAFVGFVLSRPEPMWAELKALAACRGGRVHRAADPLAGLKDLKEVRGLLAKDLAVLASREGLDLVPGDDPMLLAYLLDPSNTTPEGVARRYGGEWTEDAAHRALLSERLHRNLLKRLEGEEKLLWLYHEVEKPLSRVLAHMEATGVRRDVAYLQALSLELAEEIRRLEEEVFRLAGHPFNLNSRDQLERVLFDELRLPALGKTQKTGKRSTSAAVLEALREAHPIVEKILQHRELTKLKNTYVDPLPSLVHPRTGRLHTRFNQTATATGRLSSSDPNLQNIPVRTPLGQRIRRAFVAEAGWALVALDYSQIELRVLAHLSGDENLIRVFQEGKDIHTQTASWMFGVPPEAVDPLMRRAAKTVNFGVLYGMSAHRLSQELAIPYEEAVAFIERYFQSFPKVRAWIEKTLEEGRKRGYVETLFGRRRYVPDLNARVKSVREAAERMAFNMPVQGTAADLMKLAMVKLFPRLREMGARMLLQVANELLLEAPQARAEEVAALAKEAMEKAYPLAVPLEVEVGMGEDWLSAKGHHHHHH

SEQ ID NO: 164 - DNA, 30 bp, Artificial Sequence
  Description of Artificial Sequence:  Synthetic
caggaggagctcgttggcgacctggaggag

SEQ ID NO: 165 - DNA, 2526 bp, Artificial Sequence
  Description of Artificial Sequence:  Synthetic
atgaattccgaggcgatgcttccgctctttgaacccaaaggccgggtcctcctggtggacggccaccacctggcctaccgcaccttcttcgccctgaagggcctcaccacgagccggggcgaaccggtgcaggcggtctacggcttcgccaagagcctcctcaaggccctgaaggaggacgggtacaaggccgtcttcgtggtctttgacgccaaggccccctccttccgccacgaggcctacgaggcctacaaggcggggagggccccgacccccgaggacttcccccggcagctcgccctcatcaaggagctggtggacctcctggggtttacccgcctcgaggtccccggctacgaggcggacgacgttctcgccaccctggccaagaaggcggaaaaggaggggtacgaggtgcgcatcctcaccgccgaccgcgacctctaccaactcgtctccgaccgcgtcgccgtcctccaccccgagggccacctcatcaccccggagtggctttgggagaagtacggcctcaggccggagcagtgggtggacttccgcgccctcgtgggggacccctccgacaacctccccggggtcaagggcatcggggagaagaccgccctcaagctcctcaaggagtggggaagcctggaaaacctcctcaagaacctggaccgggtaaagccagaaaacgtccgggagaagatcaaggcccacctggaagacctcaggctctccttggagctctcccgggtgcgcaccgacctccccctggaggtggacctcgcccaggggcgggagcccgaccgggaggggcttagggccttcctggagaggctggagttcggcagcctcctccacgagttcggcctcctggaggcccccgcccccctggaggaggccccctggcccccgccggaaggggccttcgtgggcttcgtcctctcccgccccgagcccatgtgggcggagcttaaagccctggccgcctgcaggggcggccgcgtgcaccgggcagcagaccccttggcggggctaaaggacctcaaggaggtccggggcctcctcgccaaggacctcgccgtcttggcctcgagggaggggctagacctcgtgcccggggacgaccccatgctcctcgcctacctcctggacccttcgaacaccacccccgagggggtggcgcggcgctacgggggggagtggacggaggacgccgcccaccgggccctcctctcggagaggctccatcggaacctccttaagcgcctcgagggggaggagaagctcctttggctctaccacgaggtggaaaagcccctctcccgggtcctggcccatatggaggccaccggggtacggcgggacgtggcctaccttcaggccctttccctggagcttgcggaggagatccgccgcctcgaggaggaggtcttccgcttggcgggccaccccttcaacctcaactcccgggaccagctggaaagggtgctctttgacgagcttaggcttcccgccttgaagaagacgaagaagacaggcaagcgctccaccagcgccgcggtgctggaggccctacgggaggcccaccccatcgtggagaagatcctccagcaccgggagctcaccaagctcaagaacacctacgtggaccccctcccaagcctcgtccacccgaggacgggccgcctccacacccgcttcaaccagacggccacggccacggggaggcttagtagctccgaccccaacctgcagaacatccccgtccgcacccccttgggccagaggatccgccgggccttcgtggccgaggcgggttgggcgttggtggccctggactatagccagatagagctccgcgtcctcgcccacctctccggggacgaaaacctgatcagggtcttccaggaggggaaggacatccacacccagaccgcaagctggatgttcggcgtccccccggaggccgtggaccccctgatgcgccgggcggccaagacggtgaacttcggcgtcctctacggcatgtccgcccataggctctcccaggagcttgccatcccctacgaggaggcggtggcctttatagagcgctacttccaaagcttccccaaggtgcgggcctggatagaaaagaccctggaggaggggaggaagcggggctacgtggaaaccctcttcggaagaaggcgctacgtgcccgacctcaacgcccgggtgaagagcgtcagggaggccgcggagcgcatggccttcaacatgcccgtccagggcaccgccgccgacctcatgaagctcgccatggtgaagctcttcccccgcctccgggagatgggggcccgcatgctcctccaggtcgccaacgagctcctcctggaggccccccaagcgcgggccgaggaggtggcggctttggccaaggaggccatggagaaggcctatcccctcgccgtgcccctggaggtggaggtggggatgggggaggactggctttccgccaagggtcaccaccaccaccaccac

SEQ ID NO: 166 - protein, 842 aa, Artificial Sequence
  Description of Artificial Sequence:  Synthetic
MNSEAMLPLFEPKGRVLLVDGHHLAYRTFFALKGLTTSRGEPVQAVYGFAKSLLKALKEDGYKAVFVVFDAKAPSFRHEAYEAYKAGRAPTPEDFPRQLALIKELVDLLGFTRLEVPGYEADDVLATLAKKAEKEGYEVRILTADRDLYQLVSDRVAVLHPEGHLITPEWLWEKYGLRPEQWVDFRALVGDPSDNLPGVKGIGEKTALKLLKEWGSLENLLKNLDRVKPENVREKIKAHLEDLRLSLELSRVRTDLPLEVDLAQGREPDREGLRAFLERLEFGSLLHEFGLLEAPAPLEEAPWPPPEGAFVGFVLSRPEPMWAELKALAACRGGRVHRAADPLAGLKDLKEVRGLLAKDLAVLASREGLDLVPGDDPMLLAYLLDPSNTTPEGVARRYGGEWTEDAAHRALLSERLHRNLLKRLEGEEKLLWLYHEVEKPLSRVLAHMEATGVRRDVAYLQALSLELAEEIRRLEEEVFRLAGHPFNLNSRDQLERVLFDELRLPALKKTKKTGKRSTSAAVLEALREAHPIVEKILQHRELTKLKNTYVDPLPSLVHPRTGRLHTRFNQTATATGRLSSSDPNLQNIPVRTPLGQRIRRAFVAEAGWALVALDYSQIELRVLAHLSGDENLIRVFQEGKDIHTQTASWMFGVPPEAVDPLMRRAAKTVNFGVLYGMSAHRLSQELAIPYEEAVAFIERYFQSFPKVRAWIEKTLEEGRKRGYVETLFGRRRYVPDLNARVKSVREAAERMAFNMPVQGTAADLMKLAMVKLFPRLREMGARMLLQVANELLLEAPQARAEEVAALAKEAMEKAYPLAVPLEVEVGMGEDWLSAKGHHHHHH

SEQ ID NO: 167 - DNA, 45 bp, Artificial Sequence
  Description of Artificial Sequence:  Synthetic
ggagcgcttgcctgtcttcttcgtcttcttcaaggcgggaggcct

SEQ ID NO: 168 - DNA, 2517 bp, Artificial Sequence
  Description of Artificial Sequence:  Synthetic
atgaattcggggatgctgcccctctttgagcccaagggccgggtcctcctggtggacggccaccacctggcctaccgcaccttccacgccctgaagggcctcaccaccagccggggggagccggtgcaggcggtctacggcttcgccaagagcctcctcaaggccctcaaggaggacggggacgcggtgatcgtggtctttgacgccaaggccccctccttccgccacgaggcctacggggggtacaaggcgggccgggcccccacgccggaggactttccccggcaactcgccctcatcaaggagctggtggacctcctggggctggcgcgcctcgaggtcccgggctacgaggcggacgacgtcctggccagcctggccaagaaggcggaaaaggagggctacgaggtccgcatcctcaccgccgacaaagacctttaccagctcctttccgaccgcatccacgtcctccaccccgaggggtacctcatcaccccggcctggctttgggaaaagtacggcctgaggcccgaccagtgggccgactaccgggccctgaccggggacgagtccgacaaccttcccggggtcaagggcatcggggagaagacggcgaggaagcttctggaggagtgggggagcctggaagccctcctcaagaacctggaccggctgaagcccgccatccgggagaagatcctggcccacatggacgatctgaagctctcctgggacctggccaaggtgcgcaccgacctgcccctggaggtggacttcgccaaaaggcgggagcccgaccgggagaggcttagggcctttctggagaggcttgagtttggcagcctcctccacgagttcggccttctggaaagccccaaggccctggaggaggccccctggcccccgccggaaggggccttcgtgggctttgtgctttcccgcaaggagcccatgtgggccgatcttctggccctggccgccgccaggggcggccgcgtccaccgggcccccgagccttataaagccctcagggacctgaaggaggcgcgggggcttctcgccaaagacctgagcgttctggccctgagggaaggccttggcctcccgcccggcgacgaccccatgctcctcgcctacctcctggacccttcgaacaccacccccgagggggtggcccggcgctacggcggggagtggacggaggaggcgggggagcgggccgccctttccgagaggctcttcgccaacctgcttaagaggcttgagggggaggagaggctcctttggctttaccgggaggtggagaggcccctttccgctgtcctggcccatatggaggccacgggggtgcgcctggacgtggcctatctcagggccttgtccctggaggtggccgaggagatcgcccgcctcgaggccgaggtcttccgcctggccggccaccccttcaacctcaactcccgggaccagctggaaagggtcctctttgacgagctagggcttcccgccatcggcaagacgcaaaagaccggcaagcgctccaccagcgccgccgtcctggaggccctccgcgaggcccaccccatcgtggagaagatcctgcagtaccgggagctcaccaagctgaagagcacctacattgaccccttgccggacctcatccaccccaggacgggccgcctccacacccgcttcaaccagacggccacggccacgggcaggctaagtagctccgatcccaacctccagaacatccccgtccgcaccccgcttgggcagaggatccgccgggccttcatcgccgaggaggggtggctattggtggccctggactatagccagatagagctcagggtgctggcccacctctccggcgacgagaacctgatccgggtcttccaggaggggcgggacatccacacggagaccgccagctggatgttcggcgtcccccgggaggccgtggaccccctgatgcgccgggcggccaagaccatcaacttcggggtcctctacggcatgtcggcccaccgcctctcccaggagctagccatcccttacgaggaggcccaggccttcattgagcgctactttcagagcttccccaaggtgcgggcctggattgagaagaccctggaggagggcaggaggcgggggtacgtggagaccctcttcggccgccgccgctacgtgccagacctagaggcccgggtgaagagcgtgcgggaggcggccgagcgcatggccttcaacatgcccgtccagggcaccgccgccgacctcatgaagctggctatggtgaagctcttccccaggctggaggaaatgggggccaggatgctccttcaggtcgccaacgagctggtcctcgaggccccaaaagagagggcggaggccgtggcccggctggccaaggaggtcatggagggggtgtatcccctggccgtgcccctggaggtggaggtggggataggggaggactggctctccgccaaggagcaccaccaccaccaccac

SEQ ID NO: 169 - protein, 839 aa, Artificial Sequence
  Description of Artificial Sequence:  Synthetic
MNSGMLPLFEPKGRVLLVDGHHLAYRTFHALKGLTTSRGEPVQAVYGFAKSLLKALKEDGDAVIVVFDAKAPSFRHEAYGGYKAGRAPTPEDFPRQLALIKELVDLLGLARLEVPGYEADDVLASLAKKAEKEGYEVRILTADKDLYQLLSDRIHVLHPEGYLITPAWLWEKYGLRPDQWADYRALTGDESDNLPGVKGIGEKTARKLLEEWGSLEALLKNLDRLKPAIREKILAHMDDLKLSWDLAKVRTDLPLEVDFAKRREPDRERLRAFLERLEFGSLLHEFGLLESPKALEEAPWPPPEGAFVGFVLSRKEPMWADLLALAAARGGRVHRAPEPYKALRDLKEARGLLAKDLSVLALREGLGLPPGDDPMLLAYLLDPSNTTPEGVARRYGGEWTEEAGERAALSERLFANLLKRLEGEERLLWLYREVERPLSAVLAHMEATGVRLDVAYLRALSLEVAEEIARLEAEVFRLAGHPFNLNSRDQLERVLFDELGLPAIGKTQKTGKRSTSAAVLEALREAHPIVEKILQYRELTKLKSTYIDPLPDLIHPRTGRLHTRFNQTATATGRLSSSDPNLQNIPVRTPLGQRIRRAFIAEEGWLLVALDYSQIELRVLAHLSGDENLIRVFQEGRDIHTETASWMFGVPREAVDPLMRRAAKTINFGVLYGMSAHRLSQELAIPYEEAQAFIERYFQSFPKVRAWIEKTLEEGRRRGYVETLFGRRRYVPDLEARVKSVREAAERMAFNMPVQGTAADLMKLAMVKLFPRLEEMGARMLLQVANELVLEAPKERAEAVARLAKEVMEGVYPLAVPLEVEVGIGEDWLSAKEHHHHHH

SEQ ID NO: 170 - DNA, 33 bp, Artificial Sequence
  Description of Artificial Sequence:  Synthetic
gaggaccagctcgttggcgacctgaaggagcat

SEQ ID NO: 171 - DNA, 2517 bp, Artificial Sequence
  Description of Artificial Sequence:  Synthetic
atgaattcggggatgctgcccctctttgagcccaagggccgggtcctcctggtggacggccaccacctggcctaccgcaccttccacgccctgaagggcctcaccaccagccggggggagccggtgcaggcggtctacggcttcgccaagagcctcctcaaggccctcaaggaggacggggacgcggtgatcgtggtctttgacgccaaggccccctccttccgccacgaggcctacggggggtacaaggcgggccgggcccccacgccggaggactttccccggcaactcgccctcatcaaggagctggtggacctcctggggctggcgcgcctcgaggtcccgggctacgaggcggacgacgtcctggccagcctggccaagaaggcggaaaaggagggctacgaggtccgcatcctcaccgccgacaaagacctttaccagctcctttccgaccgcatccacgtcctccaccccgaggggtacctcatcaccccggcctggctttgggaaaagtacggcctgaggcccgaccagtgggccgactaccgggccctgaccggggacgagtccgacaaccttcccggggtcaagggcatcggggagaagacggcgaggaagcttctggaggagtgggggagcctggaagccctcctcaagaacctggaccggctgaagcccgccatccgggagaagatcctggcccacatggacgatctgaagctctcctgggacctggccaaggtgcgcaccgacctgcccctggaggtggacttcgccaaaaggcgggagcccgaccgggagaggcttagggcctttctggagaggcttgagtttggcagcctcctccacgagttcggccttctggaaagccccaaggccctggaggaggccccctggcccccgccggaaggggccttcgtgggctttgtgctttcccgcaaggagcccatgtgggccgatcttctggccctggccgccgccaggggcggccgcgtccaccgggcccccgagccttataaagccctcagggacctgaaggaggcgcgggggcttctcgccaaagacctgagcgttctggccctgagggaaggccttggcctcccgcccggcgacgaccccatgctcctcgcctacctcctggacccttcgaacaccacccccgagggggtggcccggcgctacggcggggagtggacggaggaggcgggggagcgggccgccctttccgagaggctcttcgccaacctgcttaagaggcttgagggggaggagaggctcctttggctttaccgggaggtggagaggcccctttccgctgtcctggcccatatggaggccacgggggtgcgcctggacgtggcctatctcagggccttgtccctggaggtggccgaggagatcgcccgcctcgaggccgaggtcttccgcctggccggccaccccttcaacctcaactcccgggaccagctggaaagggtcctctttgacgagctagggcttcccgccatcggcaagacgcaaaagaccggcaagcgctccaccagcgccgccgtcctggaggccctccgcgaggcccaccccatcgtggagaagatcctgcagtaccgggagctcaccaagctgaagagcacctacattgaccccttgccggacctcatccaccccaggacgggccgcctccacacccgcttcaaccagacggccacggccacgggcaggctaagtagctccgatcccaacctccagaacatccccgtccgcaccccgcttgggcagaggatccgccgggccttcatcgccgaggaggggtggctattggtggccctggactatagccagatagagctcagggtgctggcccacctctccggcgacgagaacctgatccgggtcttccaggaggggcgggacatcgccacggagaccgccagctggatgttcggcgtcccccgggaggccgtggaccccctgatgcgccgggcggccaagaccatcaacttcggggtcctctacggcatgtcggcccaccgcctctcccaggagctagccatcccttacgaggaggcccaggccttcattgagcgctactttcagagcttccccaaggtgcgggcctggattgagaagaccctggaggagggcaggaggcgggggtacgtggagaccctcttcggccgccgccgctacgtgccagacctagaggcccgggtgaagagcgtgcgggaggcggccgagcgcatggccttcaacatgcccgtccagggcaccgccgccgacctcatgaagctggctatggtgaagctcttccccaggctggaggaaatgggggccaggatgctccttcaggtcgccaacgagctggtcctcgaggccccaaaagagagggcggaggccgtggcccggctggccaaggaggtcatggagggggtgtatcccctggccgtgcccctggaggtggaggtggggataggggaggactggctctccgccaaggagcaccaccaccaccaccac

SEQ ID NO: 172 - protein, 839 aa, Artificial Sequence
  Description of Artificial Sequence:  Synthetic
MNSGMLPLFEPKGRVLLVDGHHLAYRTFHALKGLTTSRGEPVQAVYGFAKSLLKALKEDGDAVIVVFDAKAPSFRHEAYGGYKAGRAPTPEDFPRQLALIKELVDLLGLARLEVPGYEADDVLASLAKKAEKEGYEVRILTADKDLYQLLSDRIHVLHPEGYLITPAWLWEKYGLRPDQWADYRALTGDESDNLPGVKGIGEKTARKLLEEWGSLEALLKNLDRLKPAIREKILAHMDDLKLSWDLAKVRTDLPLEVDFAKRREPDRERLRAFLERLEFGSLLHEFGLLESPKALEEAPWPPPEGAFVGFVLSRKEPMWADLLALAAARGGRVHRAPEPYKALRDLKEARGLLAKDLSVLALREGLGLPPGDDPMLLAYLLDPSNTTPEGVARRYGGEWTEEAGERAALSERLFANLLKRLEGEERLLWLYREVERPLSAVLAHMEATGVRLDVAYLRALSLEVAEEIARLEAEVFRLAGHPFNLNSRDQLERVLFDELGLPAIGKTQKTGKRSTSAAVLEALREAHPIVEKILQYRELTKLKSTYIDPLPDLIHPRTGRLHTRFNQTATATGRLSSSDPNLQNIPVRTPLGQRIRRAFIAEEGWLLVALDYSQIELRVLAHLSGDENLIRVFQEGRDIATETASWMFGVPREAVDPLMRRAAKTINFGVLYGMSAHRLSQELAIPYEEAQAFIERYFQSFPKVRAWIEKTLEEGRRRGYVETLFGRRRYVPDLEARVKSVREAAERMAFNMPVQGTAADLMKLAMVKLFPRLEEMGARMLLQVANELVLEAPKERAEAVARLAKEVMEGVYPLAVPLEVEVGIGEDWLSAKEHHHHHH

SEQ ID NO: 173 - DNA, 33 bp, Artificial Sequence
  Description of Artificial Sequence:  Synthetic
gaggggcgggacatcgccacggagaccgccagc

SEQ ID NO: 174 - DNA, 2517 bp, Artificial Sequence
  Description of Artificial Sequence:  Synthetic
atgaattcggggatgctgcccctctttgagcccaagggccgggtcctcctggtggacggccaccacctggcctaccgcaccttccacgccctgaagggcctcaccaccagccggggggagccggtgcaggcggtctacggcttcgccaagagcctcctcaaggccctcaaggaggacggggacgcggtgatcgtggtctttgacgccaaggccccctccttccgccacgaggcctacggggggtacaaggcgggccgggcccccacgccggaggactttccccggcaactcgccctcatcaaggagctggtggacctcctggggctggcgcgcctcgaggtcccgggctacgaggcggacgacgtcctggccagcctggccaagaaggcggaaaaggagggctacgaggtccgcatcctcaccgccgacaaagacctttaccagctcctttccgaccgcatccacgtcctccaccccgaggggtacctcatcaccccggcctggctttgggaaaagtacggcctgaggcccgaccagtgggccgactaccgggccctgaccggggacgagtccgacaaccttcccggggtcaagggcatcggggagaagacggcgaggaagcttctggaggagtgggggagcctggaagccctcctcaagaacctggaccggctgaagcccgccatccgggagaagatcctggcccacatggacgatctgaagctctcctgggacctggccaaggtgcgcaccgacctgcccctggaggtggacttcgccaaaaggcgggagcccgaccgggagaggcttagggcctttctggagaggcttgagtttggcagcctcctccacgagttcggccttctggaaagccccaaggccctggaggaggccccctggcccccgccggaaggggccttcgtgggctttgtgctttcccgcaaggagcccatgtgggccgatcttctggccctggccgccgccaggggcggccgcgtccaccgggcccccgagccttataaagccctcagggacctgaaggaggcgcgggggcttctcgccaaagacctgagcgttctggccctgagggaaggccttggcctcccgcccggcgacgaccccatgctcctcgcctacctcctggacccttcgaacaccacccccgagggggtggcccggcgctacggcggggagtggacggaggaggcgggggagcgggccgccctttccgagaggctcttcgccaacctgcttaagaggcttgagggggaggagaggctcctttggctttaccgggaggtggagaggcccctttccgctgtcctggcccatatggaggccacgggggtgcgcctggacgtggcctatctcagggccttgtccctggaggtggccgaggagatcgcccgcctcgaggccgaggtcttccgcctggccggccaccccttcaacctcaactcccgggaccagctggaaagggtcctctttgacgagctagggcttcccgccatcggcaagacgcaaaagaccggcaagcgctccaccagcgccgccgtcctggaggccctccgcgaggcccaccccatcgtggagaagatcctgcagtaccgggagctcaccaagctgaagagcacctacattgaccccttgccggacctcatccaccccaggacgggccgcctccacacccgcttcaaccagacggccacggccacgggcaggctaagtagctccgatcccaacctccagaacatccccgtcgccaccccgcttgggcagaggatccgccgggccttcatcgccgaggaggggtggctattggtggccctggactatagccagatagagctcagggtgctggcccacctctccggcgacgagaacctgatccgggtcttccaggaggggcgggacatccacacggagaccgccagctggatgttcggcgtcccccgggaggccgtggaccccctgatgcgccgggcggccaagaccatcaacttcggggtcctctacggcatgtcggcccaccgcctctcccaggagctagccatcccttacgaggaggcccaggccttcattgagcgctactttcagagcttccccaaggtgcgggcctggattgagaagaccctggaggagggcaggaggcgggggtacgtggagaccctcttcggccgccgccgctacgtgccagacctagaggcccgggtgaagagcgtgcgggaggcggccgagcgcatggccttcaacatgcccgtccagggcaccgccgccgacctcatgaagctggctatggtgaagctcttccccaggctggaggaaatgggggccaggatgctccttcaggtcgccaacgagctggtcctcgaggccccaaaagagagggcggaggccgtggcccggctggccaaggaggtcatggagggggtgtatcccctggccgtgcccctggaggtggaggtggggataggggaggactggctctccgccaaggagcaccaccaccaccaccac

SEQ ID NO: 175 - protein, 839 aa, Artificial Sequence
  Description of Artificial Sequence:  Synthetic
MNSGMLPLFEPKGRVLLVDGHHLAYRTFHALKGLTTSRGEPVQAVYGFAKSLLKALKEDGDAVIVVFDAKAPSFRHEAYGGYKAGRAPTPEDFPRQLALIKELVDLLGLARLEVPGYEADDVLASLAKKAEKEGYEVRILTADKDLYQLLSDRIHVLHPEGYLITPAWLWEKYGLRPDQWADYRALTGDESDNLPGVKGIGEKTARKLLEEWGSLEALLKNLDRLKPAIREKILAHMDDLKLSWDLAKVRTDLPLEVDFAKRREPDRERLRAFLERLEFGSLLHEFGLLESPKALEEAPWPPPEGAFVGFVLSRKEPMWADLLALAAARGGRVHRAPEPYKALRDLKEARGLLAKDLSVLALREGLGLPPGDDPMLLAYLLDPSNTTPEGVARRYGGEWTEEAGERAALSERLFANLLKRLEGEERLLWLYREVERPLSAVLAHMEATGVRLDVAYLRALSLEVAEEIARLEAEVFRLAGHPFNLNSRDQLERVLFDELGLPAIGKTQKTGKRSTSAAVLEALREAHPIVEKILQYRELTKLKSTYIDPLPDLIHPRTGRLHTRFNQTATATGRLSSSDPNLQNIPVATPLGQRIRRAFIAEEGWLLVALDYSQIELRVLAHLSGDENLIRVFQEGRDIHTETASWMFGVPREAVDPLMRRAAKTINFGVLYGMSAHRLSQELAIPYEEAQAFIERYFQSFPKVRAWIEKTLEEGRRRGYVETLFGRRRYVPDLEARVKSVREAAERMAFNMPVQGTAADLMKLAMVKLFPRLEEMGARMLLQVANELVLEAPKERAEAVARLAKEVMEGVYPLAVPLEVEVGIGEDWLSAKEHHHHHH

SEQ ID NO: 176 - DNA, 33 bp, Artificial Sequence
  Description of Artificial Sequence:  Synthetic
cagaacatccccgtcgccaccccgcttgggcag

SEQ ID NO: 177 - DNA, 2517 bp, Artificial Sequence
  Description of Artificial Sequence:  Synthetic
atgaattcggggatgctgcccctctttgagcccaagggccgggtcctcctggtggacggccaccacctggcctaccgcaccttccacgccctgaagggcctcaccaccagccggggggagccggtgcaggcggtctacggcttcgccaagagcctcctcaaggccctcaaggaggacggggacgcggtgatcgtggtctttgacgccaaggccccctccttccgccacgaggcctacggggggtacaaggcgggccgggcccccacgccggaggactttccccggcaactcgccctcatcaaggagctggtggacctcctggggctggcgcgcctcgaggtcccgggctacgaggcggacgacgtcctggccagcctggccaagaaggcggaaaaggagggctacgaggtccgcatcctcaccgccgacaaagacctttaccagctcctttccgaccgcatccacgtcctccaccccgaggggtacctcatcaccccggcctggctttgggaaaagtacggcctgaggcccgaccagtgggccgactaccgggccctgaccggggacgagtccgacaaccttcccggggtcaagggcatcggggagaagacggcgaggaagcttctggaggagtgggggagcctggaagccctcctcaagaacctggaccggctgaagcccgccatccgggagaagatcctggcccacatggacgatctgaagctctcctgggacctggccaaggtgcgcaccgacctgcccctggaggtggacttcgccaaaaggcgggagcccgaccgggagaggcttagggcctttctggagaggcttgagtttggcagcctcctccacgagttcggccttctggaaagccccaaggccctggaggaggccccctggcccccgccggaaggggccttcgtgggctttgtgctttcccgcaaggagcccatgtgggccgatcttctggccctggccgccgccaggggcggccgcgtccaccgggcccccgagccttataaagccctcagggacctgaaggaggcgcgggggcttctcgccaaagacctgagcgttctggccctgagggaaggccttggcctcccgcccggcgacgaccccatgctcctcgcctacctcctggacccttcgaacaccacccccgagggggtggcccggcgctacggcggggagtggacggaggaggcgggggagcgggccgccctttccgagaggctcttcgccaacctgcttaagaggcttgagggggaggagaggctcctttggctttaccgggaggtggagaggcccctttccgctgtcctggcccatatggaggccacgggggtgcgcctggacgtggcctatctcagggccttgtccctggaggtggccgaggagatcgcccgcctcgaggccgaggtcttccgcctggccggccaccccttcaacctcaactcccgggaccagctggaaagggtcctctttgacgagctagggcttcccgccatcaagaagacgcaaaagaccggcaagcgctccaccagcgccgccgtcctggaggccctccgcgaggcccaccccatcgtggagaagatcctgcagtaccgggagctcaccaagctgaagagcacctacattgaccccttgccggacctcatccaccccaggacgggccgcctccacacccgcttcaaccagacggccacggccacgggcaggctaagtagctccgatcccaacctccagaacatccccgtccgcaccccgcttgggcagaggatccgccgggccttcatcgccgaggaggggtggctattggtggccctggactatagccagatagagctcagggtgctggcccacctctccggcgacgagaacctgatccgggtcttccaggaggggcgggacatccacacggagaccgccagctggatgttcggcgtcccccgggaggccgtggaccccctgatgcgccgggcggccaagaccatcaacttcggggtcctctacggcatgtcggcccaccgcctctcccaggagctagccatcccttacgaggaggcccaggccttcattgagcgctactttcagagcttccccaaggtgcgggcctggattgagaagaccctggaggagggcaggaggcgggggtacgtggagaccctcttcggccgccgccgctacgtgccagacctagaggcccgggtgaagagcgtgcgggaggcggccgagcgcatggccttcaacatgcccgtccagggcaccgccgccgacctcatgaagctggctatggtgaagctcttccccaggctggaggaaatgggggccaggatgctccttcaggtcgccaacgagctggtcctcgaggccccaaaagagagggcggaggccgtggcccggctggccaaggaggtcatggagggggtgtatcccctggccgtgcccctggaggtggaggtggggataggggaggactggctctccgccaaggagcaccaccaccaccaccac

SEQ ID NO: 178 - protein, 839 aa, Artificial Sequence
  Description of Artificial Sequence:  Synthetic
MNSGMLPLFEPKGRVLLVDGHHLAYRTFHALKGLTTSRGEPVQAVYGFAKSLLKALKEDGDAVIVVFDAKAPSFRHEAYGGYKAGRAPTPEDFPRQLALIKELVDLLGLARLEVPGYEADDVLASLAKKAEKEGYEVRILTADKDLYQLLSDRIHVLHPEGYLITPAWLWEKYGLRPDQWADYRALTGDESDNLPGVKGIGEKTARKLLEEWGSLEALLKNLDRLKPAIREKILAHMDDLKLSWDLAKVRTDLPLEVDFAKRREPDRERLRAFLERLEFGSLLHEFGLLESPKALEEAPWPPPEGAFVGFVLSRKEPMWADLLALAAARGGRVHRAPEPYKALRDLKEARGLLAKDLSVLALREGLGLPPGDDPMLLAYLLDPSNTTPEGVARRYGGEWTEEAGERAALSERLFANLLKRLEGEERLLWLYREVERPLSAVLAHMEATGVRLDVAYLRALSLEVAEEIARLEAEVFRLAGHPFNLNSRDQLERVLFDELGLPAIKKTQKTGKRSTSAAVLEALREAHPIVEKILQYRELTKLKSTYIDPLPDLIHPRTGRLHTRFNQTATATGRLSSSDPNLQNIPVRTPLGQRIRRAFIAEEGWLLVALDYSQIELRVLAHLSGDENLIRVFQEGRDIHTETASWMFGVPREAVDPLMRRAAKTINFGVLYGMSAHRLSQELAIPYEEAQAFIERYFQSFPKVRAWIEKTLEEGRRRGYVETLFGRRRYVPDLEARVKSVREAAERMAFNMPVQGTAADLMKLAMVKLFPRLEEMGARMLLQVANELVLEAPKERAEAVARLAKEVMEGVYPLAVPLEVEVGIGEDWLSAKEHHHHHH

SEQ ID NO: 179 - DNA, 33 bp, Artificial Sequence
  Description of Artificial Sequence:  Synthetic
gggcttcccgccatcaagaagacggagaagacc

SEQ ID NO: 180 - DNA, 2517 bp, Artificial Sequence
  Description of Artificial Sequence:  Synthetic
atgaattcggggatgctgcccctctttgagcccaagggccgggtcctcctggtggacggccaccacctggcctaccgcaccttccacgccctgaagggcctcaccaccagccggggggagccggtgcaggcggtctacggcttcgccaagagcctcctcaaggccctcaaggaggacggggacgcggtgatcgtggtctttgacgccaaggccccctccttccgccacgaggcctacgaggggtacaaggcgggccgggcccccacgccggaggactttccccggcaactcgccctcatcaaggagctggtggacctcctggggctggcgcgcctcgaggtcccgggctacgaggcggacgacgtcctggccagcctggccaagaaggcggaaaaggagggctacgaggtccgcatcctcaccgccgacaaagacctttaccagctcctttccgaccgcatccacgtcctccaccccgaggggtacctcatcaccccggcctggctttgggaaaagtacggcctgaggcccgaccagtgggccgactaccgggccctgaccggggacgagtccgacaaccttcccggggtcaagggcatcggggagaagacggcgaggaagcttctggaggagtgggggagcctggaagccctcctcaagaacctggaccggctgaagcccgccatccgggagaagatcctggcccacatggacgatctgaagctctcctgggacctggccaaggtgcgcaccgacctgcccctggaggtggacttcgccaaaaggcgggagcccgaccgggagaggcttagggcctttctggagaggcttgagtttggcagcctcctccacgagttcggccttctggaaagccccaaggccctggaggaggccccctggcccccgccggaaggggccttcgtgggctttgtgctttcccgcaaggagcccatgtgggccgatcttctggccctggccgccgccaggggcggccgcgtccaccgggcccccgagccttataaagccctcagggacctgaaggaggcgcgggggcttctcgccaaagacctgagcgttctggccctgagggaaggccttggcctcccgcccggcgacgaccccatgctcctcgcctacctcctggacccttcgaacaccacccccgagggggtggcccggcgctacggcggggagtggacggaggaggcgggggagcgggccgccctttccgagaggctcttcgccaacctgcttaagaggcttgagggggaggagaggctcctttggctttaccgggaggtggagaggcccctttccgctgtcctggcccatatggaggccacgggggtgcgcctggacgtggcctatctcagggccttgtccctggaggtggccgaggagatcgcccgcctcgaggccgaggtcttccgcctggccggccaccccttcaacctcaactcccgggaccagctggaaagggtcctctttgacgagctagggcttcccgccatcggcaagacgcaaaagaccggcaagcgctccaccagcgccgccgtcctggaggccctccgcgaggcccaccccatcgtggagaagatcctgcagtaccgggagctcaccaagctgaagagcacctacattgaccccttgccggacctcatccaccccaggacgggccgcctccacacccgcttcaaccagacggccacggccacgggcaggctaagtagctccgatcccaacctccagaacatccccgtccgcaccccgcttgggcagaggatccgccgggccttcatcgccgaggaggggtggctattggtggccctggactatagccagatagagctcagggtgctggcccacctctccggcgacgagaacctgatccgggtcttccaggaggggcgggacatccacacggagaccgccagctggatgttcggcgtcccccgggaggccgtggaccccctgatgcgccgggcggccaagaccatcaacttcggggtcctctacggcatgtcggcccaccgcctctcccaggagctagccatcccttacgaggaggcccaggccttcattgagcgctactttcagagcttccccaaggtgcgggcctggattgagaagaccctggaggagggcaggaggcgggggtacgtggagaccctcttcggccgccgccgctacgtgccagacctagaggcccgggtgaagagcgtgcgggaggcggccgagcgcatggccttcaacatgcccgtccagggcaccgccgccgacctcatgaagctggctatggtgaagctcttccccaggctggaggaaatgggggccaggatgctccttcaggtcgccaacgagctggtcctcgaggccccaaaagagagggcggaggccgtggcccggctggccaaggaggtcatggagggggtgtatcccctggccgtgcccctggaggtggaggtggggataggggaggactggctctccgccaaggagcaccaccaccaccaccac

SEQ ID NO: 181 - protein, 839 aa, Artificial Sequence
  Description of Artificial Sequence:  Synthetic
MNSGMLPLFEPKGRVLLVDGHHLAYRTFHALKGLTTSRGEPVQAVYGFAKSLLKALKEDGDAVIVVFDAKAPSFRHEAYEGYKAGRAPTPEDFPRQLALIKELVDLLGLARLEVPGYEADDVLASLAKKAEKEGYEVRILTADKDLYQLLSDRIHVLHPEGYLITPAWLWEKYGLRPDQWADYRALTGDESDNLPGVKGIGEKTARKLLEEWGSLEALLKNLDRLKPAIREKILAHMDDLKLSWDLAKVRTDLPLEVDFAKRREPDRERLRAFLERLEFGSLLHEFGLLESPKALEEAPWPPPEGAFVGFVLSRKEPMWADLLALAAARGGRVHRAPEPYKALRDLKEARGLLAKDLSVLALREGLGLPPGDDPMLLAYLLDPSNTTPEGVARRYGGEWTEEAGERAALSERLFANLLKRLEGEERLLWLYREVERPLSAVLAHMEATGVRLDVAYLRALSLEVAEEIARLEAEVFRLAGHPFNLNSRDQLERVLFDELGLPAIGKTQKTGKRSTSAAVLEALREAHPIVEKILQYRELTKLKSTYIDPLPDLIHPRTGRLHTRFNQTATATGRLSSSDPNLQNIPVRTPLGQRIRRAFIAEEGWLLVALDYSQIELRVLAHLSGDENLIRVFQEGRDIHTETASWMFGVPREAVDPLMRRAAKTINFGVLYGMSAHRLSQELAIPYEEAQAFIERYFQSFPKVRAWIEKTLEEGRRRGYVETLFGRRRYVPDLEARVKSVREAAERMAFNMPVQGTAADLMKLAMVKLFPRLEEMGARMLLQVANELVLEAPKERAEAVARLAKEVMEGVYPLAVPLEVEVGIGEDWLSAKEHHHHHH

SEQ ID NO: 182 - DNA, 39 bp, Artificial Sequence
  Description of Artificial Sequence:  Synthetic
ctagggcttcccgccatcaagaagacgcaaaagaccggc

SEQ ID NO: 183 - DNA, 2517 bp, Artificial Sequence
  Description of Artificial Sequence:  Synthetic
atgaattcggggatgctgcccctctttgagcccaagggccgggtcctcctggtggacggccaccacctggcctaccgcaccttccacgccctgaagggcctcaccaccagccggggggagccggtgcaggcggtctacggcttcgccaagagcctcctcaaggccctcaaggaggacggggacgcggtgatcgtggtctttgacgccaaggccccctccttccgccacgaggcctacggggggtacaaggcgggccgggccgagacggaggaggactttccccggcaactcgccctcatcaaggagctggtggacctcctggggctggcgcgcctcgaggtcccgggctacgaggcggacgacgtcctggccagcctggccaagaaggcggaaaaggagggctacgaggtccgcatcctcaccgccgacaaagacctttaccagctcctttccgaccgcatccacgtcctccaccccgaggggtacctcatcaccccggcctggctttgggaaaagtacggcctgaggcccgaccagtgggccgactaccgggccctgaccggggacgagtccgacaaccttcccggggtcaagggcatcggggagaagacggcgaggaagcttctggaggagtgggggagcctggaagccctcctcaagaacctggaccggctgaagcccgccatccgggagaagatcctggcccacatggacgatctgaagctctcctgggacctggccaaggtgcgcaccgacctgcccctggaggtggacttcgccaaaaggcgggagcccgaccgggagaggcttagggcctttctggagaggcttgagtttggcagcctcctccacgagttcggccttctggaaagccccaaggccctggaggaggccccctggcccccgccggaaggggccttcgtgggctttgtgctttcccgcaaggagcccatgtgggccgatcttctggccctggccgccgccaggggcggccgcgtccaccgggcccccgagccttataaagccctcagggacctgaaggaggcgcgggggcttctcgccaaagacctgagcgttctggccctgagggaaggccttggcctcccgcccggcgacgaccccatgctcctcgcctacctcctggacccttcgaacaccacccccgagggggtggcccggcgctacggcggggagtggacggaggaggcgggggagcgggccgccctttccgagaggctcttcgccaacctgcttaagaggcttgagggggaggagaggctcctttggctttaccgggaggtggagaggcccctttccgctgtcctggcccatatggaggccacgggggtgcgcctggacgtggcctatctcagggccttgtccctggaggtggccgaggagatcgcccgcctcgaggccgaggtcttccgcctggccggccaccccttcaacctcaactcccgggaccagctggaaagggtcctctttgacgagctagggcttcccgccatcggcaagacgcaaaagaccggcaagcgctccaccagcgccgccgtcctggaggccctccgcgaggcccaccccatcgtggagaagatcctgcagtaccgggagctcaccaagctgaagagcacctacattgaccccttgccggacctcatccaccccaggacgggccgcctccacacccgcttcaaccagacggccacggccacgggcaggctaagtagctccgatcccaacctccagaacatccccgtccgcaccccgcttgggcagaggatccgccgggccttcatcgccgaggaggggtggctattggtggccctggactatagccagatagagctcagggtgctggcccacctctccggcgacgagaacctgatccgggtcttccaggaggggcgggacatccacacggagaccgccagctggatgttcggcgtcccccgggaggccgtggaccccctgatgcgccgggcggccaagaccatcaacttcggggtcctctacggcatgtcggcccaccgcctctcccaggagctagccatcccttacgaggaggcccaggccttcattgagcgctactttcagagcttccccaaggtgcgggcctggattgagaagaccctggaggagggcaggaggcgggggtacgtggagaccctcttcggccgccgccgctacgtgccagacctagaggcccgggtgaagagcgtgcgggaggcggccgagcgcatggccttcaacatgcccgtccagggcaccgccgccgacctcatgaagctggctatggtgaagctcttccccaggctggaggaaatgggggccaggatgctccttcaggtcgccaacgagctggtcctcgaggccccaaaagagagggcggaggccgtggcccggctggccaaggaggtcatggagggggtgtatcccctggccgtgcccctggaggtggaggtggggataggggaggactggctctccgccaaggagcaccaccaccaccaccac

SEQ ID NO: 184 - protein, 839 aa, Artificial Sequence
  Description of Artificial Sequence:  Synthetic
MNSGMLPLFEPKGRVLLVDGHHLAYRTFHALKGLTTSRGEPVQAVYGFAKSLLKALKEDGDAVIVVFDAKAPSFRHEAYGGYKAGRAETEEDFPRQLALIKELVDLLGLARLEVPGYEADDVLASLAKKAEKEGYEVRILTADKDLYQLLSDRIHVLHPEGYLITPAWLWEKYGLRPDQWADYRALTGDESDNLPGVKGIGEKTARKLLEEWGSLEALLKNLDRLKPAIREKILAHMDDLKLSWDLAKVRTDLPLEVDFAKRREPDRERLRAFLERLEFGSLLHEFGLLESPKALEEAPWPPPEGAFVGFVLSRKEPMWADLLALAAARGGRVHRAPEPYKALRDLKEARGLLAKDLSVLALREGLGLPPGDDPMLLAYLLDPSNTTPEGVARRYGGEWTEEAGERAALSERLFANLLKRLEGEERLLWLYREVERPLSAVLAHMEATGVRLDVAYLRALSLEVAEEIARLEAEVFRLAGHPFNLNSRDQLERVLFDELGLPAIGKTQKTGKRSTSAAVLEALREAHPIVEKILQYRELTKLKSTYIDPLPDLIHPRTGRLHTRFNQTATATGRLSSSDPNLQNIPVRTPLGQRIRRAFIAEEGWLLVALDYSQIELRVLAHLSGDENLIRVFQEGRDIHTETASWMFGVPREAVDPLMRRAAKTINFGVLYGMSAHRLSQELAIPYEEAQAFIERYFQSFPKVRAWIEKTLEEGRRRGYVETLFGRRRYVPDLEARVKSVREAAERMAFNMPVQGTAADLMKLAMVKLFPRLEEMGARMLLQVANELVLEAPKERAEAVARLAKEVMEGVYPLAVPLEVEVGIGEDWLSAKEHHHHHH

SEQ ID NO: 185 - DNA, 39 bp, Artificial Sequence
  Description of Artificial Sequence:  Synthetic
ccggggaaagtcctcctccgtctcggcccggcccgcctt

SEQ ID NO: 186 - DNA, 2517 bp, Artificial Sequence
  Description of Artificial Sequence:  Synthetic
atgaattcggggatgctgcccctctttgagcccaagggccgggtcctcctggtggacggccaccacctggcctaccgcaccttccacgccctgaagggcctcaccaccagccggggggagccggtgcaggcggtctacggcttcgccaagagcctcctcaaggccctcaaggaggacggggacgcggtgatcgtggtctttgacgccaaggccccctccttccgccacgaggcctacggggggtacaaggcgggccgggcccccacgccggaggactttccccggcaactcgccctcatcaaggagctggtggacctcctggggttcacgcgcctcgaggtcccgggctacgaggcggacgacgtcctggccagcctggccaagaaggcggaaaaggagggctacgaggtccgcatcctcaccgccgacaaagacctttaccagctcctttccgaccgcatccacgtcctccaccccgaggggtacctcatcaccccggcctggctttgggaaaagtacggcctgaggcccgaccagtgggccgactaccgggccctgaccggggacgagtccgacaaccttcccggggtcaagggcatcggggagaagacggcgaggaagcttctggaggagtgggggagcctggaagccctcctcaagaacctggaccggctgaagcccgccatccgggagaagatcctggcccacatggacgatctgaagctctcctgggacctggccaaggtgcgcaccgacctgcccctggaggtggacttcgccaaaaggcgggagcccgaccgggagaggcttagggcctttctggagaggcttgagtttggcagcctcctccacgagttcggccttctggaaagccccaaggccctggaggaggccccctggcccccgccggaaggggccttcgtgggctttgtgctttcccgcaaggagcccatgtgggccgatcttctggccctggccgccgccaggggcggccgcgtccaccgggcccccgagccttataaagccctcagggacctgaaggaggcgcgggggcttctcgccaaagacctgagcgttctggccctgagggaaggccttggcctcccgcccggcgacgaccccatgctcctcgcctacctcctggacccttcgaacaccacccccgagggggtggcccggcgctacggcggggagtggacggaggaggcgggggagcgggccgccctttccgagaggctcttcgccaacctgcttaagaggcttgagggggaggagaggctcctttggctttaccgggaggtggagaggcccctttccgctgtcctggcccatatggaggccacgggggtgcgcctggacgtggcctatctcagggccttgtccctggaggtggccgaggagatcgcccgcctcgaggccgaggtcttccgcctggccggccaccccttcaacctcaactcccgggaccagctggaaagggtcctctttgacgagctagggcttcccgccatcggcaagacgcaaaagaccggcaagcgctccaccagcgccgccgtcctggaggccctccgcgaggcccaccccatcgtggagaagatcctgcagtaccgggagctcaccaagctgaagagcacctacattgaccccttgccggacctcatccaccccaggacgggccgcctccacacccgcttcaaccagacggccacggccacgggcaggctaagtagctccgatcccaacctccagaacatccccgtccgcaccccgcttgggcagaggatccgccgggccttcatcgccgaggaggggtggctattggtggccctggactatagccagatagagctcagggtgctggcccacctctccggcgacgagaacctgatccgggtcttccaggaggggcgggacatccacacggagaccgccagctggatgttcggcgtcccccgggaggccgtggaccccctgatgcgccgggcggccaagaccatcaacttcggggtcctctacggcatgtcggcccaccgcctctcccaggagctagccatcccttacgaggaggcccaggccttcattgagcgctactttcagagcttccccaaggtgcgggcctggattgagaagaccctggaggagggcaggaggcgggggtacgtggagaccctcttcggccgccgccgctacgtgccagacctagaggcccgggtgaagagcgtgcgggaggcggccgagcgcatggccttcaacatgcccgtccagggcaccgccgccgacctcatgaagctggctatggtgaagctcttccccaggctggaggaaatgggggccaggatgctccttcaggtcgccaacgagctggtcctcgaggccccaaaagagagggcggaggccgtggcccggctggccaaggaggtcatggagggggtgtatcccctggccgtgcccctggaggtggaggtggggataggggaggactggctctccgccaaggagcaccaccaccaccaccac

SEQ ID NO: 187 - protein, 839 aa, Artificial Sequence
  Description of Artificial Sequence:  Synthetic
MNSGMLPLFEPKGRVLLVDGHHLAYRTFHALKGLTTSRGEPVQAVYGFAKSLLKALKEDGDAVIVVFDAKAPSFRHEAYGGYKAGRAPTPEDFPRQLALIKELVDLLGFTRLEVPGYEADDVLASLAKKAEKEGYEVRILTADKDLYQLLSDRIHVLHPEGYLITPAWLWEKYGLRPDQWADYRALTGDESDNLPGVKGIGEKTARKLLEEWGSLEALLKNLDRLKPAIREKILAHMDDLKLSWDLAKVRTDLPLEVDFAKRREPDRERLRAFLERLEFGSLLHEFGLLESPKALEEAPWPPPEGAFVGFVLSRKEPMWADLLALAAARGGRVHRAPEPYKALRDLKEARGLLAKDLSVLALREGLGLPPGDDPMLLAYLLDPSNTTPEGVARRYGGEWTEEAGERAALSERLFANLLKRLEGEERLLWLYREVERPLSAVLAHMEATGVRLDVAYLRALSLEVAEEIARLEAEVFRLAGHPFNLNSRDQLERVLFDELGLPAIGKTQKTGKRSTSAAVLEALREAHPIVEKILQYRELTKLKSTYIDPLPDLIHPRTGRLHTRFNQTATATGRLSSSDPNLQNIPVRTPLGQRIRRAFIAEEGWLLVALDYSQIELRVLAHLSGDENLIRVFQEGRDIHTETASWMFGVPREAVDPLMRRAAKTINFGVLYGMSAHRLSQELAIPYEEAQAFIERYFQSFPKVRAWIEKTLEEGRRRGYVETLFGRRRYVPDLEARVKSVREAAERMAFNMPVQGTAADLMKLAMVKLFPRLEEMGARMLLQVANELVLEAPKERAEAVARLAKEVMEGVYPLAVPLEVEVGIGEDWLSAKEHHHHHH

SEQ ID NO: 188 - DNA, 36 bp, Artificial Sequence
  Description of Artificial Sequence:  Synthetic
cgggacctcgaggcgcgtgaaccccaggaggtccac

SEQ ID NO: 189 - DNA, 2517 bp, Artificial Sequence
  Description of Artificial Sequence:  Synthetic
atgaattcggggatgctgcccctctttgagcccaagggccgggtcctcctggtggacggccaccacctggcctaccgcaccttccacgccctgaagggcctcaccaccagccggggggagccggtgcaggcggtctacggcttcgccaagagcctcctcaaggccctcaaggaggacggggacgcggtgatcgtggtctttgacgccaaggccccctccttccgccacgaggcctacggggggtacaaggcgggccgggcccccacgccggaggactttccccggcaactcgccctcatcaaggagctggtggacctcctggggctggcgcgcctcgaggtcccgggctacgaggcggacgacgtcctggccagcctggccaagaaggcggaaaaggagggctacgaggtccgcatcctcaccgccgacaaagacctttaccagctcctttccgaccgcatccacgtcctccaccccgaggggtacctcatcaccccggcctggctttgggaaaagtacggcctgaggcccgaccagtgggccgactaccgggccctgaccggggacgagtccgacaaccttcccggggtcaagggcatcggggagaagacggcgaggaagcttctggaggagtgggggagcctggaagccctcctcaagaacctggaccggctgaagcccgccatccgggagaagatcctggcccacatggacgatctgaagctctcctgggacctggccaaggtgcgcaccgacctgcccctggaggtggacttcgccaaaaggcgggagcccgaccgggagaggcttagggcctttctggagaggcttgagtttggcagcctcctccacgagttcggccttctggaaagccccaaggccctggaggaggccccctggcccccgccggaaggggccttcgtgggctttgtgctttcccgcaaggagcccatgtgggccgatcttctggccctggccgccgccaggggcggccgcgtccaccgggcccccgagccttataaagccctcagggacctgaaggaggcgcgggggcttctcgccaaagacctgagcgttctggccctgagggaaggccttggcctcccgcccggcgacgaccccatgctcctcgcctacctcctggacccttcgaacaccacccccgagggggtggcccggcgctacggcggggagtggacggaggaggcgggggagcgggccgccctttccgagaggctcttcgccaacctgcttaagaggcttgagggggaggagaggctcctttggctttaccgggaggtggagaggcccctttccgctgtcctggcccatatggaggccacgggggtgcgcctggacgtggcctatctcagggccttgtccctggaggtggccgaggagatcgcccgcctcgaggccgaggtcttccgcctggccggccaccccttcaacctcaactcccgggaccagctggaaagggtcctctttgacgagctcaggcttcccaagttgaagaagacgaagaagaccggtaagcgctccaccagcgccgccgtcctggaggccctccgcgaggcccaccccatcgtggagaagatcctgcagtaccgggagctcaccaagctgaagagcacctacattgaccccttgccggacctcatccaccccaggacgggccgcctccacacccgcttcaaccagacggccacggccacgggcaggctaagtagctccgatcccaacctccagaacatccccgtccgcaccccgcttgggcagaggatccgccgggccttcatcgccgaggaggggtggctattggtggccctggactatagccagatagagctcagggtgctggcccacctctccggcgacgagaacctgatccgggtcttccaggaggggcgggacatccacacggagaccgccagctggatgttcggcgtcccccgggaggccgtggaccccctgatgcgccgggcggccaagaccatcaacttcggggtcctctacggcatgtcggcccaccgcctctcccaggagctagccatcccttacgaggaggcccaggccttcattgagcgctactttcagagcttccccaaggtgcgggcctggattgagaagaccctggaggagggcaggaggcgggggtacgtggagaccctcttcggccgccgccgctacgtgccagacctagaggcccgggtgaagagcgtgcgggaggcggccgagcgcatggccttcaacatgcccgtccagggcaccgccgccgacctcatgaagctggctatggtgaagctcttccccaggctggaggaaatgggggccaggatgctccttcaggtcgccaacgagctggtcctcgaggccccaaaagagagggcggaggccgtggcccggctggccaaggaggtcatggagggggtgtatcccctggccgtgcccctggaggtggaggtggggataggggaggactggctctccgccaaggagcaccaccaccaccaccac

SEQ ID NO: 190 - protein, 839 aa, Artificial Sequence
  Description of Artificial Sequence:  Synthetic
MNSGMLPLFEPKGRVLLVDGHHLAYRTFHALKGLTTSRGEPVQAVYGFAKSLLKALKEDGDAVIVVFDAKAPSFRHEAYGGYKAGRAPTPEDFPRQLALIKELVDLLGLARLEVPGYEADDVLASLAKKAEKEGYEVRILTADKDLYQLLSDRIHVLHPEGYLITPAWLWEKYGLRPDQWADYRALTGDESDNLPGVKGIGEKTARKLLEEWGSLEALLKNLDRLKPAIREKILAHMDDLKLSWDLAKVRTDLPLEVDFAKRREPDRERLRAFLERLEFGSLLHEFGLLESPKALEEAPWPPPEGAFVGFVLSRKEPMWADLLALAAARGGRVHRAPEPYKALRDLKEARGLLAKDLSVLALREGLGLPPGDDPMLLAYLLDPSNTTPEGVARRYGGEWTEEAGERAALSERLFANLLKRLEGEERLLWLYREVERPLSAVLAHMEATGVRLDVAYLRALSLEVAEEIARLEAEVFRLAGHPFNLNSRDQLERVLFDELRLPKLKKTKKTGKRSTSAAVLEALREAHPIVEKILQYRELTKLKSTYIDPLPDLIHPRTGRLHTRFNQTATATGRLSSSDPNLQNIPVRTPLGQRIRRAFIAEEGWLLVALDYSQIELRVLAHLSGDENLIRVFQEGRDIHTETASWMFGVPREAVDPLMRRAAKTINFGVLYGMSAHRLSQELAIPYEEAQAFIERYFQSFPKVRAWIEKTLEEGRRRGYVETLFGRRRYVPDLEARVKSVREAAERMAFNMPVQGTAADLMKLAMVKLFPRLEEMGARMLLQVANELVLEAPKERAEAVARLAKEVMEGVYPLAVPLEVEVGIGEDWLSAKEHHHHHH

SEQ ID NO: 191 - DNA, 18 bp, Artificial Sequence
  Description of Artificial Sequence:  Synthetic
ctcctccacgagttcggc

SEQ ID NO: 192 - DNA, 48 bp, Artificial Sequence
  Description of Artificial Sequence:  Synthetic
accggtcttcttcgtcttcttcaacttgggaagcctgagctcgtcaaa

SEQ ID NO: 193 - DNA, 33 bp, Artificial Sequence
  Description of Artificial Sequence:  Synthetic
aagacgaagaagaccggtaagcgctccaccagc

SEQ ID NO: 194 - DNA, 52 bp, Artificial Sequence
  Description of Artificial Sequence:  Synthetic
gtcgactctagatcagtggtggtggtggtggtgcttggccgcccggcgcatc

SEQ ID NO: 195 - DNA, 60 bp, Artificial Sequence
  modified_base (19)..(42): The bases in these positions within this primer are 9135716661224f the base shown and 3 4.221382e-312ach of the other 3 nucleotides.; Description of Artificial Sequence:  Synthetic
ggagcgcttaccggtcttttgcgtcttcttgatcttgggaagccttagctcgtcaaagag

SEQ ID NO: 196 - DNA, 18 bp, Artificial Sequence
  Description of Artificial Sequence:  Synthetic
ctcctccacgagttcggc

SEQ ID NO: 197 - DNA, 60 bp, Artificial Sequence
  modified_base (19)..(42): The bases at these positions within this primer are 9135716661224f the base shown and 3 4.221382e-312ach of the other 3 nucleotides.; Description of Artificial Sequence:  Synthetic
caaaagaccggtaagcgctccaccagcgccgccgtcctggaggccctccgcgaggcccac

SEQ ID NO: 198 - DNA, 52 bp, Artificial Sequence; identical to SEQ ID NO: 194
  Description of Artificial Sequence:  Synthetic

SEQ ID NO: 199 - DNA, 2517 bp, Artificial Sequence
  Description of Artificial Sequence:  Synthetic
atgaattcggggatgctgcccctctttgagcccaagggccgggtcctcctggtggacggccaccacctggcctaccgcaccttccacgccctgaagggcctcaccaccagccggggggagccggtgcaggcggtctacggcttcgccaagagcctcctcaaggccctcaaggaggacggggacgcggtgatcgtggtctttgacgccaaggccccctccttccgccacgaggcctacggggggtacaaggcgggccgggcccccacgccggaggactttccccggcaactcgccctcatcaaggagctggtggacctcctggggctggcgcgcctcgaggtcccgggctacgaggcggacgacgtcctggccagcctggccaagaaggcggaaaaggagggctacgaggtccgcatcctcaccgccgacaaagacctttaccagctcctttccgaccgcatccacgtcctccaccccgaggggtacctcatcaccccggcctggctttgggaaaagtacggcctgaggcccgaccagtgggccgactaccgggccctgaccggggacgagtccgacaaccttcccggggtcaagggcatcggggagaagacggcgaggaagcttctggaggagtgggggagcctggaagccctcctcaagaacctggaccggctgaagcccgccatccgggagaagatcctggcccacatggacgatctgaagctctcctgggacctggccaaggtgcgcaccgacctgcccctggaggtggacttcgccaaaaggcgggagcccgaccgggagaggcttagggcctttctggagaggcttgagtttggcagcctcctccacgagttcggccttctggaaagccccaaggccctggaggaggccccctggcccccgccggaaggggccttcgtgggctttgtgctttcccgcaaggagcccatgtgggccgatcttctggccctggccgccgccaggggcggccgcgtccaccgggcccccgagccttataaagccctcagggacctgaaggaggcgcgggggcttctcgccaaagacctgagcgttctggccctgagggaaggccttggcctcccgcccggcgacgaccccatgctcctcgcctacctcctggacccttcgaacaccacccccgagggggtggcccggcgctacggcggggagtggacggaggaggcgggggagcgggccgccctttccgagaggctcttcgccaacctgcttaagaggcttgagggggaggagaggctcctttggctttaccgggaggtggagaggcccctttccgctgtcctggcccatatggaggccacgggggtgcgcctggacgtggcctatctcagggccttgtccctggaggtggccgaggagatcgcccgcctcgaggccgaggtcttccgcctggccggccaccccttcaacctcaactcccgggaccagctggaaagggtcctctttgacgagctaaggcttcccaagatcaacaagacgaagaagaccggtaagcgctccaccagcgccgccgtcctggaggccctccgcgaggcccaccccatcgtggagaagatcctgcagtaccgggagctcaccaagctgaagagcacctacattgaccccttgccggacctcatccaccccaggacgggccgcctccacacccgcttcaaccagacggccacggccacgggcaggctaagtagctccgatcccaacctccagaacatccccgtccgcaccccgcttgggcagaggatccgccgggccttcatcgccgaggaggggtggctattggtggccctggactatagccagatagagctcagggtgctggcccacctctccggcgacgagaacctgatccgggtcttccaggaggggcgggacatccacacggagaccgccagctggatgttcggcgtcccccgggaggccgtggaccccctgatgcgccgggcggccaagaccatcaacttcggggtcctctacggcatgtcggcccaccgcctctcccaggagctagccatcccttacgaggaggcccaggccttcattgagcgctactttcagagcttccccaaggtgcgggcctggattgagaagaccctggaggagggcaggaggcgggggtacgtggagaccctcttcggccgccgccgctacgtgccagacctagaggcccgggtgaagagcgtgcgggaggcggccgagcgcatggccttcaacatgcccgtccagggcaccgccgccgacctcatgaagctggctatggtgaagctcttccccaggctggaggaaatgggggccaggatgctccttcaggtcgccaacgagctggtcctcgaggccccaaaagagagggcggaggccgtggcccggctggccaaggaggtcatggagggggtgtatcccctggccgtgcccctggaggtggaggtggggataggggaggactggctctccgccaaggagcaccaccaccaccaccac

SEQ ID NO: 200 - protein, 839 aa, Artificial Sequence
  Description of Artificial Sequence:  Synthetic
MNSGMLPLFEPKGRVLLVDGHHLAYRTFHALKGLTTSRGEPVQAVYGFAKSLLKALKEDGDAVIVVFDAKAPSFRHEAYGGYKAGRAPTPEDFPRQLALIKELVDLLGLARLEVPGYEADDVLASLAKKAEKEGYEVRILTADKDLYQLLSDRIHVLHPEGYLITPAWLWEKYGLRPDQWADYRALTGDESDNLPGVKGIGEKTARKLLEEWGSLEALLKNLDRLKPAIREKILAHMDDLKLSWDLAKVRTDLPLEVDFAKRREPDRERLRAFLERLEFGSLLHEFGLLESPKALEEAPWPPPEGAFVGFVLSRKEPMWADLLALAAARGGRVHRAPEPYKALRDLKEARGLLAKDLSVLALREGLGLPPGDDPMLLAYLLDPSNTTPEGVARRYGGEWTEEAGERAALSERLFANLLKRLEGEERLLWLYREVERPLSAVLAHMEATGVRLDVAYLRALSLEVAEEIARLEAEVFRLAGHPFNLNSRDQLERVLFDELRLPKINKTKKTGKRSTSAAVLEALREAHPIVEKILQYRELTKLKSTYIDPLPDLIHPRTGRLHTRFNQTATATGRLSSSDPNLQNIPVRTPLGQRIRRAFIAEEGWLLVALDYSQIELRVLAHLSGDENLIRVFQEGRDIHTETASWMFGVPREAVDPLMRRAAKTINFGVLYGMSAHRLSQELAIPYEEAQAFIERYFQSFPKVRAWIEKTLEEGRRRGYVETLFGRRRYVPDLEARVKSVREAAERMAFNMPVQGTAADLMKLAMVKLFPRLEEMGARMLLQVANELVLEAPKERAEAVARLAKEVMEGVYPLAVPLEVEVGIGEDWLSAKEHHHHHH

SEQ ID NO: 201 - DNA, 2517 bp, Artificial Sequence
  Description of Artificial Sequence:  Synthetic
atgaattcggggatgctgcccctctttgagcccaagggccgggtcctcctggtggacggccaccacctggcctaccgcaccttccacgccctgaagggcctcaccaccagccggggggagccggtgcaggcggtctacggcttcgccaagagcctcctcaaggccctcaaggaggacggggacgcggtgatcgtggtctttgacgccaaggccccctccttccgccacgaggcctacggggggtacaaggcgggccgggcccccacgccggaggactttccccggcaactcgccctcatcaaggagctggtggacctcctggggctggcgcgcctcgaggtcccgggctacgaggcggacgacgtcctggccagcctggccaagaaggcggaaaaggagggctacgaggtccgcatcctcaccgccgacaaagacctttaccagctcctttccgaccgcatccacgtcctccaccccgaggggtacctcatcaccccggcctggctttgggaaaagtacggcctgaggcccgaccagtgggccgactaccgggccctgaccggggacgagtccgacaaccttcccggggtcaagggcatcggggagaagacggcgaggaagcttctggaggagtgggggagcctggaagccctcctcaagaacctggaccggctgaagcccgccatccgggagaagatcctggcccacatggacgatctgaagctctcctgggacctggccaaggtgcgcaccgacctgcccctggaggtggacttcgccaaaaggcgggagcccgaccgggagaggcttagggcctttctggagaggcttgagtttggcagcctcctccacgagttcggccttctggaaagccccaaggccctggaggaggccccctggcccccgccggaaggggccttcgtgggctttgtgctttcccgcaaggagcccatgtgggccgatcttctggccctggccgccgccaggggcggccgcgtccaccgggcccccgagccttataaagccctcagggacctgaaggaggcgcgggggcttctcgccaaagacctgagcgttctggccctgagggaaggccttggcctcccgcccggcgacgaccccatgctcctcgcctacctcctggacccttcgaacaccacccccgagggggtggcccggcgctacggcggggagtggacggaggaggcgggggagcgggccgccctttccgagaggctcttcgccaacctgcttaagaggcttgagggggaggagaggctcctttggctttaccgggaggtggagaggcccctttccgctgtcctggcccatatggaggccacgggggtgcgcctggacgtggcctatctcagggccttgtccctggaggtggccgaggagatcgcccgcctcgaggccgaggtcttccgcctggccggccaccccttcaacctcaactcccgggaccagctggaaagggtcctctttgacgagctaaggattcccaagatcaagaagacgcataagaccggtaagcgctccaccagcgccgccgtcctggaggccctccgcgaggcccaccccatcgtggagaagatcctgcagtaccgggagctcaccaagctgaagagcacctacattgaccccttgccggacctcatccaccccaggacgggccgcctccacacccgcttcaaccagacggccacggccacgggcaggctaagtagctccgatcccaacctccagaacatccccgtccgcaccccgcttgggcagaggatccgccgggccttcatcgccgaggaggggtggctattggtggccctggactatagccagatagagctcagggtgctggcccacctctccggcgacgagaacctgatccgggtcttccaggaggggcgggacatccacacggagaccgccagctggatgttcggcgtcccccgggaggccgtggaccccctgatgcgccgggcggccaagaccatcaacttcggggtcctctacggcatgtcggcccaccgcctctcccaggagctagccatcccttacgaggaggcccaggccttcattgagcgctactttcagagcttccccaaggtgcgggcctggattgagaagaccctggaggagggcaggaggcgggggtacgtggagaccctcttcggccgccgccgctacgtgccagacctagaggcccgggtgaagagcgtgcgggaggcggccgagcgcatggccttcaacatgcccgtccagggcaccgccgccgacctcatgaagctggctatggtgaagctcttccccaggctggaggaaatgggggccaggatgctccttcaggtcgccaacgagctggtcctcgaggccccaaaagagagggcggaggccgtggcccggctggccaaggaggtcatggagggggtgtatcccctggccgtgcccctggaggtggaggtggggataggggaggactggctctccgccaaggagcaccaccaccaccaccac

SEQ ID NO: 202 - protein, 839 aa, Artificial Sequence
  Description of Artificial Sequence:  Synthetic
MNSGMLPLFEPKGRVLLVDGHHLAYRTFHALKGLTTSRGEPVQAVYGFAKSLLKALKEDGDAVIVVFDAKAPSFRHEAYGGYKAGRAPTPEDFPRQLALIKELVDLLGLARLEVPGYEADDVLASLAKKAEKEGYEVRILTADKDLYQLLSDRIHVLHPEGYLITPAWLWEKYGLRPDQWADYRALTGDESDNLPGVKGIGEKTARKLLEEWGSLEALLKNLDRLKPAIREKILAHMDDLKLSWDLAKVRTDLPLEVDFAKRREPDRERLRAFLERLEFGSLLHEFGLLESPKALEEAPWPPPEGAFVGFVLSRKEPMWADLLALAAARGGRVHRAPEPYKALRDLKEARGLLAKDLSVLALREGLGLPPGDDPMLLAYLLDPSNTTPEGVARRYGGEWTEEAGERAALSERLFANLLKRLEGEERLLWLYREVERPLSAVLAHMEATGVRLDVAYLRALSLEVAEEIARLEAEVFRLAGHPFNLNSRDQLERVLFDELRIPKIKKTHKTGKRSTSAAVLEALREAHPIVEKILQYRELTKLKSTYIDPLPDLIHPRTGRLHTRFNQTATATGRLSSSDPNLQNIPVRTPLGQRIRRAFIAEEGWLLVALDYSQIELRVLAHLSGDENLIRVFQEGRDIHTETASWMFGVPREAVDPLMRRAAKTINFGVLYGMSAHRLSQELAIPYEEAQAFIERYFQSFPKVRAWIEKTLEEGRRRGYVETLFGRRRYVPDLEARVKSVREAAERMAFNMPVQGTAADLMKLAMVKLFPRLEEMGARMLLQVANELVLEAPKERAEAVARLAKEVMEGVYPLAVPLEVEVGIGEDWLSAKEHHHHHH

SEQ ID NO: 203 - DNA, 2517 bp, Artificial Sequence
  Description of Artificial Sequence:  Synthetic
atgaattcggggatgctgcccctctttgagcccaagggccgggtcctcctggtggacggccaccacctggcctaccgcaccttccacgccctgaagggcctcaccaccagccggggggagccggtgcaggcggtctacggcttcgccaagagcctcctcaaggccctcaaggaggacggggacgcggtgatcgtggtctttgacgccaaggccccctccttccgccacgaggcctacggggggtacaaggcgggccgggcccccacgccggaggactttccccggcaactcgccctcatcaaggagctggtggacctcctggggctggcgcgcctcgaggtcccgggctacgaggcggacgacgtcctggccagcctggccaagaaggcggaaaaggagggctacgaggtccgcatcctcaccgccgacaaagacctttaccagctcctttccgaccgcatccacgtcctccaccccgaggggtacctcatcaccccggcctggctttgggaaaagtacggcctgaggcccgaccagtgggccgactaccgggccctgaccggggacgagtccgacaaccttcccggggtcaagggcatcggggagaagacggcgaggaagcttctggaggagtgggggagcctggaagccctcctcaagaacctggaccggctgaagcccgccatccgggagaagatcctggcccacatggacgatctgaagctctcctgggacctggccaaggtgcgcaccgacctgcccctggaggtggacttcgccaaaaggcgggagcccgaccgggagaggcttagggcctttctggagaggcttgagtttggcagcctcctccacgagttcggccttctggaaagccccaaggccctggaggaggccccctggcccccgccggaaggggccttcgtgggctttgtgctttcccgcaaggagcccatgtgggccgatcttctggccctggccgccgccaggggcggccgcgtccaccgggcccccgagccttataaagccctcagggacctgaaggaggcgcgggggcttctcgccaaagacctgagcgttctggccctgagggaaggccttggcctcccgcccggcgacgaccccatgctcctcgcctacctcctggacccttcgaacaccacccccgagggggtggcccggcgctacggcggggagtggacggaggaggcgggggagcgggccgccctttccgagaggctcttcgccaacctgcttaagaggcttgagggggaggagaggctcctttggctttaccgggaggtggagaggcccctttccgctgtcctggcccatatggaggccacgggggtgcgcctggacgtggcctatctcagggccttgtccctggaggtggccgaggagatcgcccgcctcgaggccgaggtcttccgcctggccggccaccccttcaacctcaactcccgggaccagctggaaagggtcctctttgacgagctcaggcttcccaagttgaagaagacgaagaagaccggtaagcgctccagcagcgccgccgtcctggaggccctccgcgaggcccaccccatcgtggagaagatcctgcagtaccgggagctcaccaagctgaagagcacctacattgaccccttgccggacctcatccaccccaggacgggccgcctccacacccgcttcaaccagacggccacggccacgggcaggctaagtagctccgatcccaacctccagaacatccccgtccgcaccccgcttgggcagaggatccgccgggccttcatcgccgaggaggggtggctattggtggccctggactatagccagatagagctcagggtgctggcccacctctccggcgacgagaacctgatccgggtcttccaggaggggcgggacatccacacggagaccgccagctggatgttcggcgtcccccgggaggccgtggaccccctgatgcgccgggcggccaagaccatcaacttcggggtcctctacggcatgtcggcccaccgcctctcccaggagctagccatcccttacgaggaggcccaggccttcattgagcgctactttcagagcttccccaaggtgcgggcctggattgagaagaccctggaggagggcaggaggcgggggtacgtggagaccctcttcggccgccgccgctacgtgccagacctagaggcccgggtgaagagcgtgcgggaggcggccgagcgcatggccttcaacatgcccgtccagggcaccgccgccgacctcatgaagctggctatggtgaagctcttccccaggctggaggaaatgggggccaggatgctccttcaggtcgccaacgagctggtcctcgaggccccaaaagagagggcggaggccgtggcccggctggccaaggaggtcatggagggggtgtatcccctggccgtgcccctggaggtggaggtggggataggggaggactggctctccgccaaggagcaccaccaccaccaccac

SEQ ID NO: 204 - protein, 839 aa, Artificial Sequence
  Description of Artificial Sequence:  Synthetic
MNSGMLPLFEPKGRVLLVDGHHLAYRTFHALKGLTTSRGEPVQAVYGFAKSLLKALKEDGDAVIVVFDAKAPSFRHEAYGGYKAGRAPTPEDFPRQLALIKELVDLLGLARLEVPGYEADDVLASLAKKAEKEGYEVRILTADKDLYQLLSDRIHVLHPEGYLITPAWLWEKYGLRPDQWADYRALTGDESDNLPGVKGIGEKTARKLLEEWGSLEALLKNLDRLKPAIREKILAHMDDLKLSWDLAKVRTDLPLEVDFAKRREPDRERLRAFLERLEFGSLLHEFGLLESPKALEEAPWPPPEGAFVGFVLSRKEPMWADLLALAAARGGRVHRAPEPYKALRDLKEARGLLAKDLSVLALREGLGLPPGDDPMLLAYLLDPSNTTPEGVARRYGGEWTEEAGERAALSERLFANLLKRLEGEERLLWLYREVERPLSAVLAHMEATGVRLDVAYLRALSLEVAEEIARLEAEVFRLAGHPFNLNSRDQLERVLFDELRLPKLKKTKKTGKRSSSAAVLEALREAHPIVEKILQYRELTKLKSTYIDPLPDLIHPRTGRLHTRFNQTATATGRLSSSDPNLQNIPVRTPLGQRIRRAFIAEEGWLLVALDYSQIELRVLAHLSGDENLIRVFQEGRDIHTETASWMFGVPREAVDPLMRRAAKTINFGVLYGMSAHRLSQELAIPYEEAQAFIERYFQSFPKVRAWIEKTLEEGRRRGYVETLFGRRRYVPDLEARVKSVREAAERMAFNMPVQGTAADLMKLAMVKLFPRLEEMGARMLLQVANELVLEAPKERAEAVARLAKEVMEGVYPLAVPLEVEVGIGEDWLSAKEHHHHHH

SEQ ID NO: 205 - DNA, 2517 bp, Artificial Sequence
  Description of Artificial Sequence:  Synthetic
atgaattcggggatgctgcccctctttgagcccaagggccgggtcctcctggtggacggccaccacctggcctaccgcaccttccacgccctgaagggcctcaccaccagccggggggagccggtgcaggcggtctacggcttcgccaagagcctcctcaaggccctcaaggaggacggggacgcggtgatcgtggtctttgacgccaaggccccctccttccgccacgaggcctacggggggtacaaggcgggccgggcccccacgccggaggactttccccggcaactcgccctcatcaaggagctggtggacctcctggggctggcgcgcctcgaggtcccgggctacgaggcggacgacgtcctggccagcctggccaagaaggcggaaaaggagggctacgaggtccgcatcctcaccgccgacaaagacctttaccagctcctttccgaccgcatccacgtcctccaccccgaggggtacctcatcaccccggcctggctttgggaaaagtacggcctgaggcccgaccagtgggccgactaccgggccctgaccggggacgagtccgacaaccttcccggggtcaagggcatcggggagaagacggcgaggaagcttctggaggagtgggggagcctggaagccctcctcaagaacctggaccggctgaagcccgccatccgggagaagatcctggcccacatggacgatctgaagctctcctgggacctggccaaggtgcgcaccgacctgcccctggaggtggacttcgccaaaaggcgggagcccgaccgggagaggcttagggcctttctggagaggcttgagtttggcagcctcctccacgagttcggccttctggaaagccccaaggccctggaggaggccccctggcccccgccggaaggggccttcgtgggctttgtgctttcccgcaaggagcccatgtgggccgatcttctggccctggccgccgccaggggcggccgcgtccaccgggcccccgagccttataaagccctcagggacctgaaggaggcgcgggggcttctcgccaaagacctgagcgttctggccctgagggaaggccttggcctcccgcccggcgacgaccccatgctcctcgcctacctcctggacccttcgaacaccacccccgagggggtggcccggcgctacggcggggagtggacggaggaggcgggggagcgggccgccctttccgagaggctcttcgccaacctgcttaagaggcttgagggggaggagaggctcctttggctttaccgggaggtggagaggcccctttccgctgtcctggcccatatggaggccacgggggtgcgcctggacgtggcctatctcagggccttgtccctggaggtggccgaggagatcgcccgcctcgaggccgaggtcttccgcctggccggccaccccttcaacctcaactcccgggaccagctggaaagggtcctctttgacgagctcaggcttcccaagttgaagaagacgaagaagaccggtaagcgctccaccagcgccgccctcctggaggccctccgcgaggcccaccccatcgtggagaagatcctgcagtaccgggagctcaccaagctgaagagcacctacattgaccccttgccggacctcatccaccccaggacgggccgcctccacacccgcttcaaccagacggccacggccacgggcaggctaagtagctccgatcccaacctccagaacatccccgtccgcaccccgcttgggcagaggatccgccgggccttcatcgccgaggaggggtggctattggtggccctggactatagccagatagagctcagggtgctggcccacctctccggcgacgagaacctgatccgggtcttccaggaggggcgggacatccacacggagaccgccagctggatgttcggcgtcccccgggaggccgtggaccccctgatgcgccgggcggccaagaccatcaacttcggggtcctctacggcatgtcggcccaccgcctctcccaggagctagccatcccttacgaggaggcccaggccttcattgagcgctactttcagagcttccccaaggtgcgggcctggattgagaagaccctggaggagggcaggaggcgggggtacgtggagaccctcttcggccgccgccgctacgtgccagacctagaggcccgggtgaagagcgtgcgggaggcggccgagcgcatggccttcaacatgcccgtccagggcaccgccgccgacctcatgaagctggctatggtgaagctcttccccaggctggaggaaatgggggccaggatgctccttcaggtcgccaacgagctggtcctcgaggccccaaaagagagggcggaggccgtggcccggctggccaaggaggtcatggagggggtgtatcccctggccgtgcccctggaggtggaggtggggataggggaggactggctctccgccaaggagcaccaccaccaccaccac

SEQ ID NO: 206 - protein, 839 aa, Artificial Sequence
  Description of Artificial Sequence:  Synthetic
MNSGMLPLFEPKGRVLLVDGHHLAYRTFHALKGLTTSRGEPVQAVYGFAKSLLKALKEDGDAVIVVFDAKAPSFRHEAYGGYKAGRAPTPEDFPRQLALIKELVDLLGLARLEVPGYEADDVLASLAKKAEKEGYEVRILTADKDLYQLLSDRIHVLHPEGYLITPAWLWEKYGLRPDQWADYRALTGDESDNLPGVKGIGEKTARKLLEEWGSLEALLKNLDRLKPAIREKILAHMDDLKLSWDLAKVRTDLPLEVDFAKRREPDRERLRAFLERLEFGSLLHEFGLLESPKALEEAPWPPPEGAFVGFVLSRKEPMWADLLALAAARGGRVHRAPEPYKALRDLKEARGLLAKDLSVLALREGLGLPPGDDPMLLAYLLDPSNTTPEGVARRYGGEWTEEAGERAALSERLFANLLKRLEGEERLLWLYREVERPLSAVLAHMEATGVRLDVAYLRALSLEVAEEIARLEAEVFRLAGHPFNLNSRDQLERVLFDELRLPKLKKTKKTGKRSTSAALLEALREAHPIVEKILQYRELTKLKSTYIDPLPDLIHPRTGRLHTRFNQTATATGRLSSSDPNLQNIPVRTPLGQRIRRAFIAEEGWLLVALDYSQIELRVLAHLSGDENLIRVFQEGRDIHTETASWMFGVPREAVDPLMRRAAKTINFGVLYGMSAHRLSQELAIPYEEAQAFIERYFQSFPKVRAWIEKTLEEGRRRGYVETLFGRRRYVPDLEARVKSVREAAERMAFNMPVQGTAADLMKLAMVKLFPRLEEMGARMLLQVANELVLEAPKERAEAVARLAKEVMEGVYPLAVPLEVEVGIGEDWLSAKEHHHHHH

SEQ ID NO: 207 - DNA, 21 bp, Artificial Sequence
  Description of Artificial Sequence:  Synthetic
gtcggaggggtcccccacgag

SEQ ID NO: 208 - DNA, 17 bp, Artificial Sequence
  Description of Artificial Sequence:  Synthetic
tgtggaattgtgagcgg

SEQ ID NO: 209 - DNA, 75 bp, Artificial Sequence
  modified_base (28)..(59): The bases in these positions within this primer are 9135716661224f the base shown and 3 4.221382e-312ach of the other 3 nucleotides.; Description of Artificial Sequence:  Synthetic
ctcgtgggggacccctccgacaacctccccggggtcaagggcatcggggagaagaccgccctcaagcttctcaag

SEQ ID NO: 210 - DNA, 23 bp, Artificial Sequence
  Description of Artificial Sequence:  Synthetic
gtggcctccatatgggccaggac

SEQ ID NO: 211 - DNA, 2526 bp, Artificial Sequence
  Description of Artificial Sequence:  Synthetic
atgaattccgaggcgatgcttccgctctttgaacccaaaggccgggtcctcctggtggacggccaccacctggcctaccgcaccttcttcgccctgaagggcctcaccacgagccggggcgaaccggtgcaggcggtctacggcttcgccaagagcctcctcaaggccctgaaggaggacgggtacaaggccgtcttcgtggtctttgacgccaaggccccctccttccgccacgaggcctacgaggcctacaaggcggggagggccccgacccccgaggacttcccccggcagctcgccctcatcaaggagctggtggacctcctggggtttacccgcctcgaggtccccggctacgaggcggacgacgttctcgccaccctggccaagaaggcggaaaaggaggggtacgaggtgcgcatcctcaccgccgaccgcgacctctaccaactcgtctccgaccgcgtcgccgtcctccaccccgagggccacctcatcaccccggagtggctttgggagaagtacggcctcaggccggagcagtgggtggacttccgcgccctcgtgggggacccctccgacaacctccgaggggtcaggggcatcggggagaagaccgccctcaagctcctcaaggagtggggaagcctggaaaacctcctcaagaacctggaccgggtaaagccagaaaacgtccgggagaagatcaaggcccacctggaagacctcaggctctccttggagctctcccgggtgcgcaccgacctccccctggaggtggacctcgcccaggggcgggagcccgaccgggaggggcttagggccttcctggagaggctggagttcggcagcctcctccacgagttcggcctcctggaggcccccgcccccctggaggaggccccctggcccccgccggaaggggccttcgtgggcttcgtcctctcccgccccgagcccatgtgggcggagcttaaagccctggccgcctgcaggggcggccgcgtgcaccgggcagcagaccccttggcggggctaaaggacctcaaggaggtccggggcctcctcgccaaggacctcgccgtcttggcctcgagggaggggctagacctcgtgcccggggacgaccccatgctcctcgcctacctcctggacccttcgaacaccacccccgagggggtggcgcggcgctacgggggggagtggacggaggacgccgcccaccgggccctcctctcggagaggctccatcggaacctccttaagcgcctcgagggggaggagaagctcctttggctctaccacgaggtggaaaagcccctctcccgggtcctggcccatatggaggccaccggggtacggcgggacgtggcctaccttcaggccctttccctggagcttgcggaggagatccgccgcctcgaggaggaggtcttccgcttggcgggccaccccttcaacctcaactcccgggaccagctggaaagggtgctctttgacgagcttaggcttcccgccttggggaagacgcaaaagacaggcaagcgctccaccagcgccgcggtgctggaggccctacgggaggcccaccccatcgtggagaagatcctccagcaccgggagctcaccaagctcaagaacacctacgtggaccccctcccaagcctcgtccacccgaggacgggccgcctccacacccgcttcaaccagacggccacggccacggggaggcttagtagctccgaccccaacctgcagaacatccccgtccgcacccccttgggccagaggatccgccgggccttcgtggccgaggcgggttgggcgttggtggccctggactatagccagatagagctccgcgtcctcgcccacctctccggggacgaaaacctgatcagggtcttccaggaggggaaggacatccacacccagaccgcaagctggatgttcggcgtccccccggaggccgtggaccccctgatgcgccgggcggccaagacggtgaacttcggcgtcctctacggcatgtccgcccataggctctcccaggagcttgccatcccctacgaggaggcggtggcctttatagagcgctacttccaaagcttccccaaggtgcgggcctggatagaaaagaccctggaggaggggaggaagcggggctacgtggaaaccctcttcggaagaaggcgctacgtgcccgacctcaacgcccgggtgaagagcgtcagggaggccgcggagcgcatggccttcaacatgcccgtccagggcaccgccgccgacctcatgaagctcgccatggtgaagctcttcccccgcctccgggagatgggggcccgcatgctcctccaggtcgccaacgagctcctcctggaggccccccaagcgcgggccgaggaggtggcggctttggccaaggaggccatggagaaggcctatcccctcgccgtgcccctggaggtggaggtggggatgggggaggactggctttccgccaagggtcaccaccaccaccaccac

SEQ ID NO: 212 - protein, 842 aa, Artificial Sequence
  Description of Artificial Sequence:  Synthetic
MNSEAMLPLFEPKGRVLLVDGHHLAYRTFFALKGLTTSRGEPVQAVYGFAKSLLKALKEDGYKAVFVVFDAKAPSFRHEAYEAYKAGRAPTPEDFPRQLALIKELVDLLGFTRLEVPGYEADDVLATLAKKAEKEGYEVRILTADRDLYQLVSDRVAVLHPEGHLITPEWLWEKYGLRPEQWVDFRALVGDPSDNLRGVRGIGEKTALKLLKEWGSLENLLKNLDRVKPENVREKIKAHLEDLRLSLELSRVRTDLPLEVDLAQGREPDREGLRAFLERLEFGSLLHEFGLLEAPAPLEEAPWPPPEGAFVGFVLSRPEPMWAELKALAACRGGRVHRAADPLAGLKDLKEVRGLLAKDLAVLASREGLDLVPGDDPMLLAYLLDPSNTTPEGVARRYGGEWTEDAAHRALLSERLHRNLLKRLEGEEKLLWLYHEVEKPLSRVLAHMEATGVRRDVAYLQALSLELAEEIRRLEEEVFRLAGHPFNLNSRDQLERVLFDELRLPALGKTQKTGKRSTSAAVLEALREAHPIVEKILQHRELTKLKNTYVDPLPSLVHPRTGRLHTRFNQTATATGRLSSSDPNLQNIPVRTPLGQRIRRAFVAEAGWALVALDYSQIELRVLAHLSGDENLIRVFQEGKDIHTQTASWMFGVPPEAVDPLMRRAAKTVNFGVLYGMSAHRLSQELAIPYEEAVAFIERYFQSFPKVRAWIEKTLEEGRKRGYVETLFGRRRYVPDLNARVKSVREAAERMAFNMPVQGTAADLMKLAMVKLFPRLREMGARMLLQVANELLLEAPQARAEEVAALAKEAMEKAYPLAVPLEVEVGMGEDWLSAKGHHHHHH

SEQ ID NO: 213 - DNA, 2526 bp, Artificial Sequence
  Description of Artificial Sequence:  Synthetic
atgaattccgaggcgatgcttccgctctttgaacccaaaggccgggtcctcctggtggacggccaccacctggcctaccgcaccttcttcgccctgaagggcctcaccacgagccggggcgaaccggtgcaggcggtctacggcttcgccaagagcctcctcaaggccctgaaggaggacgggtacaaggccgtcttcgtggtctttgacgccaaggccccctccttccgccacgaggcctacgaggcctacaaggcggggagggccccgacccccgaggacttcccccggcagctcgccctcatcaaggagctggtggacctcctggggtttacccgcctcgaggtccccggctacgaggcggacgacgttctcgccaccctggccaagaaggcggaaaaggaggggtacgaggtgcgcatcctcaccgccgaccgcgacctctaccaactcgtctccgaccgcgtcgccgtcctccaccccgagggccacctcatcaccccggagtggctttgggagaagtacggcctcaggccggagcagtgggtggacttccgcgccctcgtgggggacccctccgacaacctccccggggtcaagggcatcggggagtataccgccctcaagctcctcaaggagtggggaagcctggaaaacctcctcaagaacctggaccgggtaaagccagaaaacgtccgggagaagatcaaggcccacctggaagacctcaggctctccttggagctctcccgggtgcgcaccgacctccccctggaggtggacctcgcccaggggcgggagcccgaccgggaggggcttagggccttcctggagaggctggagttcggcagcctcctccacgagttcggcctcctggaggcccccgcccccctggaggaggccccctggcccccgccggaaggggccttcgtgggcttcgtcctctcccgccccgagcccatgtgggcggagcttaaagccctggccgcctgcaggggcggccgcgtgcaccgggcagcagaccccttggcggggctaaaggacctcaaggaggtccggggcctcctcgccaaggacctcgccgtcttggcctcgagggaggggctagacctcgtgcccggggacgaccccatgctcctcgcctacctcctggacccttcgaacaccacccccgagggggtggcgcggcgctacgggggggagtggacggaggacgccgcccaccgggccctcctctcggagaggctccatcggaacctccttaagcgcctcgagggggaggagaagctcctttggctctaccacgaggtggaaaagcccctctcccgggtcctggcccatatggaggccaccggggtacggcgggacgtggcctaccttcaggccctttccctggagcttgcggaggagatccgccgcctcgaggaggaggtcttccgcttggcgggccaccccttcaacctcaactcccgggaccagctggaaagggtgctctttgacgagcttaggcttcccgccttggggaagacgcaaaagacaggcaagcgctccaccagcgccgcggtgctggaggccctacgggaggcccaccccatcgtggagaagatcctccagcaccgggagctcaccaagctcaagaacacctacgtggaccccctcccaagcctcgtccacccgaggacgggccgcctccacacccgcttcaaccagacggccacggccacggggaggcttagtagctccgaccccaacctgcagaacatccccgtccgcacccccttgggccagaggatccgccgggccttcgtggccgaggcgggttgggcgttggtggccctggactatagccagatagagctccgcgtcctcgcccacctctccggggacgaaaacctgatcagggtcttccaggaggggaaggacatccacacccagaccgcaagctggatgttcggcgtccccccggaggccgtggaccccctgatgcgccgggcggccaagacggtgaacttcggcgtcctctacggcatgtccgcccataggctctcccaggagcttgccatcccctacgaggaggcggtggcctttatagagcgctacttccaaagcttccccaaggtgcgggcctggatagaaaagaccctggaggaggggaggaagcggggctacgtggaaaccctcttcggaagaaggcgctacgtgcccgacctcaacgcccgggtgaagagcgtcagggaggccgcggagcgcatggccttcaacatgcccgtccagggcaccgccgccgacctcatgaagctcgccatggtgaagctcttcccccgcctccgggagatgggggcccgcatgctcctccaggtcgccaacgagctcctcctggaggccccccaagcgcgggccgaggaggtggcggctttggccaaggaggccatggagaaggcctatcccctcgccgtgcccctggaggtggaggtggggatgggggaggactggctttccgccaagggtcaccaccaccaccaccac

SEQ ID NO: 214 - protein, 842 aa, Artificial Sequence
  Description of Artificial Sequence:  Synthetic
MNSEAMLPLFEPKGRVLLVDGHHLAYRTFFALKGLTTSRGEPVQAVYGFAKSLLKALKEDGYKAVFVVFDAKAPSFRHEAYEAYKAGRAPTPEDFPRQLALIKELVDLLGFTRLEVPGYEADDVLATLAKKAEKEGYEVRILTADRDLYQLVSDRVAVLHPEGHLITPEWLWEKYGLRPEQWVDFRALVGDPSDNLPGVKGIGEYTALKLLKEWGSLENLLKNLDRVKPENVREKIKAHLEDLRLSLELSRVRTDLPLEVDLAQGREPDREGLRAFLERLEFGSLLHEFGLLEAPAPLEEAPWPPPEGAFVGFVLSRPEPMWAELKALAACRGGRVHRAADPLAGLKDLKEVRGLLAKDLAVLASREGLDLVPGDDPMLLAYLLDPSNTTPEGVARRYGGEWTEDAAHRALLSERLHRNLLKRLEGEEKLLWLYHEVEKPLSRVLAHMEATGVRRDVAYLQALSLELAEEIRRLEEEVFRLAGHPFNLNSRDQLERVLFDELRLPALGKTQKTGKRSTSAAVLEALREAHPIVEKILQHRELTKLKNTYVDPLPSLVHPRTGRLHTRFNQTATATGRLSSSDPNLQNIPVRTPLGQRIRRAFVAEAGWALVALDYSQIELRVLAHLSGDENLIRVFQEGKDIHTQTASWMFGVPPEAVDPLMRRAAKTVNFGVLYGMSAHRLSQELAIPYEEAVAFIERYFQSFPKVRAWIEKTLEEGRKRGYVETLFGRRRYVPDLNARVKSVREAAERMAFNMPVQGTAADLMKLAMVKLFPRLREMGARMLLQVANELLLEAPQARAEEVAALAKEAMEKAYPLAVPLEVEVGMGEDWLSAKGHHHHHH

SEQ ID NO: 215 - DNA, 2526 bp, Artificial Sequence
  Description of Artificial Sequence:  Synthetic
atgaattccgaggcgatgcttccgctctttgaacccaaaggccgggtcctcctggtggacggccaccacctggcctaccgcaccttcttcgccctgaagggcctcaccacgagccggggcgaaccggtgcaggcggtctacggcttcgccaagagcctcctcaaggccctgaaggaggacgggtacaaggccgtcttcgtggtctttgacgccaaggccccctccttccgccacgaggcctacgaggcctacaaggcggggagggccccgacccccgaggacttcccccggcagctcgccctcatcaaggagctggtggacctcctggggtttacccgcctcgaggtccccggctacgaggcggacgacgttctcgccaccctggccaagaaggcggaaaaggaggggtacgaggtgcgcatcctcaccgccgaccgcgacctctaccaactcgtctccgaccgcgtcgccgtcctccaccccgagggccacctcatcaccccggagtggctttgggagaagtacggcctcaggccggagcagtgggtggacttccgcgccctcgtgggggacccctccgacaacctccccggggtcaagggcatcagggagaagaccgccctcaagctcctcaaggagtggggaagcctggaaaacctcctcaagaacctggaccgggtaaagccagaaaacgtccgggagaagatcaaggcccacctggaagacctcaggctctccttggagctctcccgggtgcgcaccgacctccccctggaggtggacctcgcccaggggcgggagcccgaccgggaggggcttagggccttcctggagaggctggagttcggcagcctcctccacgagttcggcctcctggaggcccccgcccccctggaggaggccccctggcccccgccggaaggggccttcgtgggcttcgtcctctcccgccccgagcccatgtgggcggagcttaaagccctggccgcctgcaggggcggccgcgtgcaccgggcagcagaccccttggcggggctaaaggacctcaaggaggtccggggcctcctcgccaaggacctcgccgtcttggcctcgagggaggggctagacctcgtgcccggggacgaccccatgctcctcgcctacctcctggacccttcgaacaccacccccgagggggtggcgcggcgctacgggggggagtggacggaggacgccgcccaccgggccctcctctcggagaggctccatcggaacctccttaagcgcctcgagggggaggagaagctcctttggctctaccacgaggtggaaaagcccctctcccgggtcctggcccatatggaggccaccggggtacggcgggacgtggcctaccttcaggccctttccctggagcttgcggaggagatccgccgcctcgaggaggaggtcttccgcttggcgggccaccccttcaacctcaactcccgggaccagctggaaagggtgctctttgacgagcttaggcttcccgccttggggaagacgcaaaagacaggcaagcgctccaccagcgccgcggtgctggaggccctacgggaggcccaccccatcgtggagaagatcctccagcaccgggagctcaccaagctcaagaacacctacgtggaccccctcccaagcctcgtccacccgaggacgggccgcctccacacccgcttcaaccagacggccacggccacggggaggcttagtagctccgaccccaacctgcagaacatccccgtccgcacccccttgggccagaggatccgccgggccttcgtggccgaggcgggttgggcgttggtggccctggactatagccagatagagctccgcgtcctcgcccacctctccggggacgaaaacctgatcagggtcttccaggaggggaaggacatccacacccagaccgcaagctggatgttcggcgtccccccggaggccgtggaccccctgatgcgccgggcggccaagacggtgaacttcggcgtcctctacggcatgtccgcccataggctctcccaggagcttgccatcccctacgaggaggcggtggcctttatagagcgctacttccaaagcttccccaaggtgcgggcctggatagaaaagaccctggaggaggggaggaagcggggctacgtggaaaccctcttcggaagaaggcgctacgtgcccgacctcaacgcccgggtgaagagcgtcagggaggccgcggagcgcatggccttcaacatgcccgtccagggcaccgccgccgacctcatgaagctcgccatggtgaagctcttcccccgcctccgggagatgggggcccgcatgctcctccaggtcgccaacgagctcctcctggaggccccccaagcgcgggccgaggaggtggcggctttggccaaggaggccatggagaaggcctatcccctcgccgtgcccctggaggtggaggtggggatgggggaggactggctttccgccaagggtcaccaccaccaccaccac

SEQ ID NO: 216 - protein, 842 aa, Artificial Sequence
  Description of Artificial Sequence:  Synthetic
MNSEAMLPLFEPKGRVLLVDGHHLAYRTFFALKGLTTSRGEPVQAVYGFAKSLLKALKEDGYKAVFVVFDAKAPSFRHEAYEAYKAGRAPTPEDFPRQLALIKELVDLLGFTRLEVPGYEADDVLATLAKKAEKEGYEVRILTADRDLYQLVSDRVAVLHPEGHLITPEWLWEKYGLRPEQWVDFRALVGDPSDNLPGVKGIREKTALKLLKEWGSLENLLKNLDRVKPENVREKIKAHLEDLRLSLELSRVRTDLPLEVDLAQGREPDREGLRAFLERLEFGSLLHEFGLLEAPAPLEEAPWPPPEGAFVGFVLSRPEPMWAELKALAACRGGRVHRAADPLAGLKDLKEVRGLLAKDLAVLASREGLDLVPGDDPMLLAYLLDPSNTTPEGVARRYGGEWTEDAAHRALLSERLHRNLLKRLEGEEKLLWLYHEVEKPLSRVLAHMEATGVRRDVAYLQALSLELAEEIRRLEEEVFRLAGHPFNLNSRDQLERVLFDELRLPALGKTQKTGKRSTSAAVLEALREAHPIVEKILQHRELTKLKNTYVDPLPSLVHPRTGRLHTRFNQTATATGRLSSSDPNLQNIPVRTPLGQRIRRAFVAEAGWALVALDYSQIELRVLAHLSGDENLIRVFQEGKDIHTQTASWMFGVPPEAVDPLMRRAAKTVNFGVLYGMSAHRLSQELAIPYEEAVAFIERYFQSFPKVRAWIEKTLEEGRKRGYVETLFGRRRYVPDLNARVKSVREAAERMAFNMPVQGTAADLMKLAMVKLFPRLREMGARMLLQVANELLLEAPQARAEEVAALAKEAMEKAYPLAVPLEVEVGMGEDWLSAKGHHHHHH

SEQ ID NO: 217 - DNA, 2517 bp, Artificial Sequence
  Description of Artificial Sequence:  Synthetic
atgaattcggggatgctgcccctctttgagcccaagggccgggtcctcctggtggacggccaccacctggcctaccgcaccttccacgccctgaagggcctcaccaccagccggggggagccggtgcaggcggtctacggcttcgccaagagcctcctcaaggccctcaaggaggacggggacgcggtgatcgtggtctttgacgccaaggccccctccttccgccacgaggcctacggggggtacaaggcgggccgggcccccacgccggaggactttccccggcaactcgccctcatcaaggagctggtggacctcctggggttcacgcgcctcgaggtcccgggctacgaggcggacgacgtcctggccagcctggccaagaaggcggaaaaggagggctacgaggtccgcatcctcaccgccgacaaagacctttaccagctcctttccgaccgcatccacgtcctccaccccgaggggtacctcatcaccccggcctggctttgggaaaagtacggcctgaggcccgaccagtgggccgactaccgggccctgaccggggacgagtccgacaaccttcccggggtcaagggcatcggggagaagacggcgaggaagcttctggaggagtgggggagcctggaagccctcctcaagaacctggaccggctgaagcccgccatccgggagaagatcctggcccacatggacgatctgaagctctcctgggacctggccaaggtgcgcaccgacctgcccctggaggtggacttcgccaaaaggcgggagcccgaccgggagaggcttagggcctttctggagaggcttgagtttggcagcctcctccacgagttcggccttctggaaagccccaaggccctggaggaggccccctggcccccgccggaaggggccttcgtgggctttgtgctttcccgcaaggagcccatgtgggccgatcttctggccctggccgccgccaggggcggccgcgtccaccgggcccccgagccttataaagccctcagggacctgaaggaggcgcgggggcttctcgccaaagacctgagcgttctggccctgagggaaggccttggcctcccgcccggcgacgaccccatgctcctcgcctacctcctggacccttcgaacaccacccccgagggggtggcccggcgctacggcggggagtggacggaggaggcgggggagcgggccgccctttccgagaggctcttcgccaacctgcttaagaggcttgagggggaggagaggctcctttggctttaccgggaggtggagaggcccctttccgctgtcctggcccatatggaggccacgggggtgcgcctggacgtggcctatctcagggccttgtccctggaggtggccgaggagatcgcccgcctcgaggccgaggtcttccgcctggccggccaccccttcaacctcaactcccgggaccagctggaaagggtcctctttgacgagctcaggcttcccaagttgaagaagacgaagaagaccggtaagcgctccagcagcgccgccgtcctggaggccctccgcgaggcccaccccatcgtggagaagatcctgcagtaccgggagctcaccaagctgaagagcacctacattgaccccttgccggacctcatccaccccaggacgggccgcctccacacccgcttcaaccagacggccacggccacgggcaggctaagtagctccgatcccaacctccagaacatccccgtccgcaccccgcttgggcagaggatccgccgggccttcatcgccgaggaggggtggctattggtggccctggactatagccagatagagctcagggtgctggcccacctctccggcgacgagaacctgatccgggtcttccaggaggggcgggacatccacacggagaccgccagctggatgttcggcgtcccccgggaggccgtggaccccctgatgcgccgggcggccaagaccatcaacttcggggtcctctacggcatgtcggcccaccgcctctcccaggagctagccatcccttacgaggaggcccaggccttcattgagcgctactttcagagcttccccaaggtgcgggcctggattgagaagaccctggaggagggcaggaggcgggggtacgtggagaccctcttcggccgccgccgctacgtgccagacctagaggcccgggtgaagagcgtgcgggaggcggccgagcgcatggccttcaacatgcccgtccagggcaccgccgccgacctcatgaagctggctatggtgaagctcttccccaggctggaggaaatgggggccaggatgctccttcaggtcgccaacgagctggtcctcgaggccccaaaagagagggcggaggccgtggcccggctggccaaggaggtcatggagggggtgtatcccctggccgtgcccctggaggtggaggtggggataggggaggactggctctccgccaaggagcaccaccaccaccaccac

SEQ ID NO: 218 - protein, 839 aa, Artificial Sequence
  Description of Artificial Sequence:  Synthetic
MNSGMLPLFEPKGRVLLVDGHHLAYRTFHALKGLTTSRGEPVQAVYGFAKSLLKALKEDGDAVIVVFDAKAPSFRHEAYGGYKAGRAPTPEDFPRQLALIKELVDLLGFTRLEVPGYEADDVLASLAKKAEKEGYEVRILTADKDLYQLLSDRIHVLHPEGYLITPAWLWEKYGLRPDQWADYRALTGDESDNLPGVKGIGEKTARKLLEEWGSLEALLKNLDRLKPAIREKILAHMDDLKLSWDLAKVRTDLPLEVDFAKRREPDRERLRAFLERLEFGSLLHEFGLLESPKALEEAPWPPPEGAFVGFVLSRKEPMWADLLALAAARGGRVHRAPEPYKALRDLKEARGLLAKDLSVLALREGLGLPPGDDPMLLAYLLDPSNTTPEGVARRYGGEWTEEAGERAALSERLFANLLKRLEGEERLLWLYREVERPLSAVLAHMEATGVRLDVAYLRALSLEVAEEIARLEAEVFRLAGHPFNLNSRDQLERVLFDELRLPKLKKTKKTGKRSSSAAVLEALREAHPIVEKILQYRELTKLKSTYIDPLPDLIHPRTGRLHTRFNQTATATGRLSSSDPNLQNIPVRTPLGQRIRRAFIAEEGWLLVALDYSQIELRVLAHLSGDENLIRVFQEGRDIHTETASWMFGVPREAVDPLMRRAAKTINFGVLYGMSAHRLSQELAIPYEEAQAFIERYFQSFPKVRAWIEKTLEEGRRRGYVETLFGRRRYVPDLEARVKSVREAAERMAFNMPVQGTAADLMKLAMVKLFPRLEEMGARMLLQVANELVLEAPKERAEAVARLAKEVMEGVYPLAVPLEVEVGIGEDWLSAKEHHHHHH

SEQ ID NO: 219 - DNA, 36 bp, Artificial Sequence; identical to SEQ ID NO: 188
  Description of Artificial Sequence:  Synthetic

SEQ ID NO: 220 - DNA, 2517 bp, Artificial Sequence
  Description of Artificial Sequence:  Synthetic
atgaattcggggatgctgcccctctttgagcccaagggccgggtcctcctggtggacggccaccacctggcctaccgcaccttccacgccctgaagggcctcaccaccagccggggggagccggtgcaggcggtctacggcttcgccaagagcctcctcaaggccctcaaggaggacggggacgcggtgatcgtggtctttgacgccaaggccccctccttccgccacgaggcctacggggggtacaaggcgggccgggccgagacggaggaggactttccccggcaactcgccctcatcaaggagctggtggacctcctggggctggcgcgcctcgaggtcccgggctacgaggcggacgacgtcctggccagcctggccaagaaggcggaaaaggagggctacgaggtccgcatcctcaccgccgacaaagacctttaccagctcctttccgaccgcatccacgtcctccaccccgaggggtacctcatcaccccggcctggctttgggaaaagtacggcctgaggcccgaccagtgggccgactaccgggccctgaccggggacgagtccgacaaccttcccggggtcaagggcatcggggagaagacggcgaggaagcttctggaggagtgggggagcctggaagccctcctcaagaacctggaccggctgaagcccgccatccgggagaagatcctggcccacatggacgatctgaagctctcctgggacctggccaaggtgcgcaccgacctgcccctggaggtggacttcgccaaaaggcgggagcccgaccgggagaggcttagggcctttctggagaggcttgagtttggcagcctcctccacgagttcggccttctggaaagccccaaggccctggaggaggccccctggcccccgccggaaggggccttcgtgggctttgtgctttcccgcaaggagcccatgtgggccgatcttctggccctggccgccgccaggggcggccgcgtccaccgggcccccgagccttataaagccctcagggacctgaaggaggcgcgggggcttctcgccaaagacctgagcgttctggccctgagggaaggccttggcctcccgcccggcgacgaccccatgctcctcgcctacctcctggacccttcgaacaccacccccgagggggtggcccggcgctacggcggggagtggacggaggaggcgggggagcgggccgccctttccgagaggctcttcgccaacctgcttaagaggcttgagggggaggagaggctcctttggctttaccgggaggtggagaggcccctttccgctgtcctggcccatatggaggccacgggggtgcgcctggacgtggcctatctcagggccttgtccctggaggtggccgaggagatcgcccgcctcgaggccgaggtcttccgcctggccggccaccccttcaacctcaactcccgggaccagctggaaagggtcctctttgacgagctcaggcttcccaagttgaagaagacgaagaagaccggtaagcgctccagcagcgccgccgtcctggaggccctccgcgaggcccaccccatcgtggagaagatcctgcagtaccgggagctcaccaagctgaagagcacctacattgaccccttgccggacctcatccaccccaggacgggccgcctccacacccgcttcaaccagacggccacggccacgggcaggctaagtagctccgatcccaacctccagaacatccccgtccgcaccccgcttgggcagaggatccgccgggccttcatcgccgaggaggggtggctattggtggccctggactatagccagatagagctcagggtgctggcccacctctccggcgacgagaacctgatccgggtcttccaggaggggcgggacatccacacggagaccgccagctggatgttcggcgtcccccgggaggccgtggaccccctgatgcgccgggcggccaagaccatcaacttcggggtcctctacggcatgtcggcccaccgcctctcccaggagctagccatcccttacgaggaggcccaggccttcattgagcgctactttcagagcttccccaaggtgcgggcctggattgagaagaccctggaggagggcaggaggcgggggtacgtggagaccctcttcggccgccgccgctacgtgccagacctagaggcccgggtgaagagcgtgcgggaggcggccgagcgcatggccttcaacatgcccgtccagggcaccgccgccgacctcatgaagctggctatggtgaagctcttccccaggctggaggaaatgggggccaggatgctccttcaggtcgccaacgagctggtcctcgaggccccaaaagagagggcggaggccgtggcccggctggccaaggaggtcatggagggggtgtatcccctggccgtgcccctggaggtggaggtggggataggggaggactggctctccgccaaggagcaccaccaccaccaccac

SEQ ID NO: 221 - protein, 839 aa, Artificial Sequence
  Description of Artificial Sequence:  Synthetic
MNSGMLPLFEPKGRVLLVDGHHLAYRTFHALKGLTTSRGEPVQAVYGFAKSLLKALKEDGDAVIVVFDAKAPSFRHEAYGGYKAGRAETEEDFPRQLALIKELVDLLGLARLEVPGYEADDVLASLAKKAEKEGYEVRILTADKDLYQLLSDRIHVLHPEGYLITPAWLWEKYGLRPDQWADYRALTGDESDNLPGVKGIGEKTARKLLEEWGSLEALLKNLDRLKPAIREKILAHMDDLKLSWDLAKVRTDLPLEVDFAKRREPDRERLRAFLERLEFGSLLHEFGLLESPKALEEAPWPPPEGAFVGFVLSRKEPMWADLLALAAARGGRVHRAPEPYKALRDLKEARGLLAKDLSVLALREGLGLPPGDDPMLLAYLLDPSNTTPEGVARRYGGEWTEEAGERAALSERLFANLLKRLEGEERLLWLYREVERPLSAVLAHMEATGVRLDVAYLRALSLEVAEEIARLEAEVFRLAGHPFNLNSRDQLERVLFDELRLPKLKKTKKTGKRSSSAAVLEALREAHPIVEKILQYRELTKLKSTYIDPLPDLIHPRTGRLHTRFNQTATATGRLSSSDPNLQNIPVRTPLGQRIRRAFIAEEGWLLVALDYSQIELRVLAHLSGDENLIRVFQEGRDIHTETASWMFGVPREAVDPLMRRAAKTINFGVLYGMSAHRLSQELAIPYEEAQAFIERYFQSFPKVRAWIEKTLEEGRRRGYVETLFGRRRYVPDLEARVKSVREAAERMAFNMPVQGTAADLMKLAMVKLFPRLEEMGARMLLQVANELVLEAPKERAEAVARLAKEVMEGVYPLAVPLEVEVGIGEDWLSAKEHHHHHH

SEQ ID NO: 222 - DNA, 39 bp, Artificial Sequence; identical to SEQ ID NO: 185
  Description of Artificial Sequence:  Synthetic

SEQ ID NO: 223 - DNA, 24 bp, Artificial Sequence
  Description of Artificial Sequence:  Synthetic
gtcggactcgtcaccggtcagggc

SEQ ID NO: 224 - DNA, 75 bp, Artificial Sequence
  modified_base (28)..(60): The bases in these positions within this primer are 9135716661224f the base shown and 3 4.221382e-312ach of the other 3 nucleotides.; Description of Artificial Sequence:  Synthetic
ctgaccggtgacgagtccgacaaccttcccggggtcaagggcatcggggagaggacggcgaggaagcttctggag

SEQ ID NO: 225 - DNA, 2517 bp, Artificial Sequence
  Description of Artificial Sequence:  Synthetic
atgaattcggggatgctgcccctctttgagcccaagggccgggtcctcctggtggacggccaccacctggcctaccgcaccttccacgccctgaagggcctcaccaccagccggggggagccggtgcaggcggtctacggcttcgccaagagcctcctcaaggccctcaaggaggacggggacgcggtgatcgtggtctttgacgccaaggccccctccttccgccacgaggcctacggggggtacaaggcgggccgggcccccacgccggaggactttccccggcaactcgccctcatcaaggagctggtggacctcctggggttcacgcgcctcgaggtcccgggctacgaggcggacgacgtcctggccagcctggccaagaaggcggaaaaggagggctacgaggtccgcatcctcaccgccgacaaagacctttaccagctcctttccgaccgcatccacgtcctccaccccgaggggtacctcatcaccccggcctggctttgggaaaagtacggcctgaggcccgaccagtgggccgactaccgggccctgaccggggacgagtccgacaaccttcccggggtcaatggcatcggggagaagacggcgaggaagcttctggaggagtgggggagcctggaagccctcctcaagaacctggaccggctgaagcccgccatccgggagaagatcctggcccacatggacgatctgaagctctcctgggacctggccaaggtgcgcaccgacctgcccctggaggtggacttcgccaaaaggcgggagcccgaccgggagaggcttagggcctttctggagaggcttgagtttggcagcctcctccacgagttcggccttctggaaagccccaaggccctggaggaggccccctggcccccgccggaaggggccttcgtgggctttgtgctttcccgcaaggagcccatgtgggccgatcttctggccctggccgccgccaggggcggccgcgtccaccgggcccccgagccttataaagccctcagggacctgaaggaggcgcgggggcttctcgccaaagacctgagcgttctggccctgagggaaggccttggcctcccgcccggcgacgaccccatgctcctcgcctacctcctggacccttcgaacaccacccccgagggggtggcccggcgctacggcggggagtggacggaggaggcgggggagcgggccgccctttccgagaggctcttcgccaacctgcttaagaggcttgagggggaggagaggctcctttggctttaccgggaggtggagaggcccctttccgctgtcctggcccatatggaggccacgggggtgcgcctggacgtggcctatctcagggccttgtccctggaggtggccgaggagatcgcccgcctcgaggccgaggtcttccgcctggccggccaccccttcaacctcaactcccgggaccagctggaaagggtcctctttgacgagctcaggcttcccaagttgaagaagacgaagaagaccggtaagcgctccagcagcgccgccgtcctggaggccctccgcgaggcccaccccatcgtggagaagatcctgcagtaccgggagctcaccaagctgaagagcacctacattgaccccttgccggacctcatccaccccaggacgggccgcctccacacccgcttcaaccagacggccacggccacgggcaggctaagtagctccgatcccaacctccagaacatccccgtccgcaccccgcttgggcagaggatccgccgggccttcatcgccgaggaggggtggctattggtggccctggactatagccagatagagctcagggtgctggcccacctctccggcgacgagaacctgatccgggtcttccaggaggggcgggacatccacacggagaccgccagctggatgttcggcgtcccccgggaggccgtggaccccctgatgcgccgggcggccaagaccatcaacttcggggtcctctacggcatgtcggcccaccgcctctcccaggagctagccatcccttacgaggaggcccaggccttcattgagcgctactttcagagcttccccaaggtgcgggcctggattgagaagaccctggaggagggcaggaggcgggggtacgtggagaccctcttcggccgccgccgctacgtgccagacctagaggcccgggtgaagagcgtgcgggaggcggccgagcgcatggccttcaacatgcccgtccagggcaccgccgccgacctcatgaagctggctatggtgaagctcttccccaggctggaggaaatgggggccaggatgctccttcaggtcgccaacgagctggtcctcgaggccccaaaagagagggcggaggccgtggcccggctggccaaggaggtcatggagggggtgtatcccctggccgtgcccctggaggtggaggtggggataggggaggactggctctccgccaaggagcaccaccaccaccaccac

SEQ ID NO: 226 - protein, 839 aa, Artificial Sequence
  Description of Artificial Sequence:  Synthetic
MNSGMLPLFEPKGRVLLVDGHHLAYRTFHALKGLTTSRGEPVQAVYGFAKSLLKALKEDGDAVIVVFDAKAPSFRHEAYGGYKAGRAPTPEDFPRQLALIKELVDLLGFTRLEVPGYEADDVLASLAKKAEKEGYEVRILTADKDLYQLLSDRIHVLHPEGYLITPAWLWEKYGLRPDQWADYRALTGDESDNLPGVNGIGEKTARKLLEEWGSLEALLKNLDRLKPAIREKILAHMDDLKLSWDLAKVRTDLPLEVDFAKRREPDRERLRAFLERLEFGSLLHEFGLLESPKALEEAPWPPPEGAFVGFVLSRKEPMWADLLALAAARGGRVHRAPEPYKALRDLKEARGLLAKDLSVLALREGLGLPPGDDPMLLAYLLDPSNTTPEGVARRYGGEWTEEAGERAALSERLFANLLKRLEGEERLLWLYREVERPLSAVLAHMEATGVRLDVAYLRALSLEVAEEIARLEAEVFRLAGHPFNLNSRDQLERVLFDELRLPKLKKTKKTGKRSSSAAVLEALREAHPIVEKILQYRELTKLKSTYIDPLPDLIHPRTGRLHTRFNQTATATGRLSSSDPNLQNIPVRTPLGQRIRRAFIAEEGWLLVALDYSQIELRVLAHLSGDENLIRVFQEGRDIHTETASWMFGVPREAVDPLMRRAAKTINFGVLYGMSAHRLSQELAIPYEEAQAFIERYFQSFPKVRAWIEKTLEEGRRRGYVETLFGRRRYVPDLEARVKSVREAAERMAFNMPVQGTAADLMKLAMVKLFPRLEEMGARMLLQVANELVLEAPKERAEAVARLAKEVMEGVYPLAVPLEVEVGIGEDWLSAKEHHHHHH

SEQ ID NO: 227 - DNA, 2517 bp, Artificial Sequence
  Description of Artificial Sequence:  Synthetic
atgaattcggggatgctgcccctctttgagcccaagggccgggtcctcctggtggacggccaccacctggcctaccgcaccttccacgccctgaagggcctcaccaccagccggggggagccggtgcaggcggtctacggcttcgccaagagcctcctcaaggccctcaaggaggacggggacgcggtgatcgtggtctttgacgccaaggccccctccttccgccacgaggcctacggggggtacaaggcgggccgggcccccacgccggaggactttccccggcaactcgccctcatcaaggagctggtggacctcctggggttcacgcgcctcgaggtcccgggctacgaggcggacgacgtcctggccagcctggccaagaaggcggaaaaggagggctacgaggtccgcatcctcaccgccgacaaagacctttaccagctcctttccgaccgcatccacgtcctccaccccgaggggtacctcatcaccccggcctggctttgggaaaagtacggcctgaggcccgaccagtgggccgactaccgggccctgaccggggacgagtccgacaaccttcccggggtcaagggcatcggggagaagacgcagaggaagcttctggaggagtgggggagcctggaagccctcctcaagaacctggaccggctgaagcccgccatccgggagaagatcctggcccacatggacgatctgaagctctcctgggacctggccaaggtgcgcaccgacctgcccctggaggtggacttcgccaaaaggcgggagcccgaccgggagaggcttagggcctttctggagaggcttgagtttggcagcctcctccacgagttcggccttctggaaagccccaaggccctggaggaggccccctggcccccgccggaaggggccttcgtgggctttgtgctttcccgcaaggagcccatgtgggccgatcttctggccctggccgccgccaggggcggccgcgtccaccgggcccccgagccttataaagccctcagggacctgaaggaggcgcgggggcttctcgccaaagacctgagcgttctggccctgagggaaggccttggcctcccgcccggcgacgaccccatgctcctcgcctacctcctggacccttcgaacaccacccccgagggggtggcccggcgctacggcggggagtggacggaggaggcgggggagcgggccgccctttccgagaggctcttcgccaacctgcttaagaggcttgagggggaggagaggctcctttggctttaccgggaggtggagaggcccctttccgctgtcctggcccatatggaggccacgggggtgcgcctggacgtggcctatctcagggccttgtccctggaggtggccgaggagatcgcccgcctcgaggccgaggtcttccgcctggccggccaccccttcaacctcaactcccgggaccagctggaaagggtcctctttgacgagctcaggcttcccaagttgaagaagacgaagaagaccggtaagcgctccagcagcgccgccgtcctggaggccctccgcgaggcccaccccatcgtggagaagatcctgcagtaccgggagctcaccaagctgaagagcacctacattgaccccttgccggacctcatccaccccaggacgggccgcctccacacccgcttcaaccagacggccacggccacgggcaggctaagtagctccgatcccaacctccagaacatccccgtccgcaccccgcttgggcagaggatccgccgggccttcatcgccgaggaggggtggctattggtggccctggactatagccagatagagctcagggtgctggcccacctctccggcgacgagaacctgatccgggtcttccaggaggggcgggacatccacacggagaccgccagctggatgttcggcgtcccccgggaggccgtggaccccctgatgcgccgggcggccaagaccatcaacttcggggtcctctacggcatgtcggcccaccgcctctcccaggagctagccatcccttacgaggaggcccaggccttcattgagcgctactttcagagcttccccaaggtgcgggcctggattgagaagaccctggaggagggcaggaggcgggggtacgtggagaccctcttcggccgccgccgctacgtgccagacctagaggcccgggtgaagagcgtgcgggaggcggccgagcgcatggccttcaacatgcccgtccagggcaccgccgccgacctcatgaagctggctatggtgaagctcttccccaggctggaggaaatgggggccaggatgctccttcaggtcgccaacgagctggtcctcgaggccccaaaagagagggcggaggccgtggcccggctggccaaggaggtcatggagggggtgtatcccctggccgtgcccctggaggtggaggtggggataggggaggactggctctccgccaaggagcaccaccaccaccaccac

SEQ ID NO: 228 - protein, 839 aa, Artificial Sequence
  Description of Artificial Sequence:  Synthetic
MNSGMLPLFEPKGRVLLVDGHHLAYRTFHALKGLTTSRGEPVQAVYGFAKSLLKALKEDGDAVIVVFDAKAPSFRHEAYGGYKAGRAPTPEDFPRQLALIKELVDLLGFTRLEVPGYEADDVLASLAKKAEKEGYEVRILTADKDLYQLLSDRIHVLHPEGYLITPAWLWEKYGLRPDQWADYRALTGDESDNLPGVKGIGEKTQRKLLEEWGSLEALLKNLDRLKPAIREKILAHMDDLKLSWDLAKVRTDLPLEVDFAKRREPDRERLRAFLERLEFGSLLHEFGLLESPKALEEAPWPPPEGAFVGFVLSRKEPMWADLLALAAARGGRVHRAPEPYKALRDLKEARGLLAKDLSVLALREGLGLPPGDDPMLLAYLLDPSNTTPEGVARRYGGEWTEEAGERAALSERLFANLLKRLEGEERLLWLYREVERPLSAVLAHMEATGVRLDVAYLRALSLEVAEEIARLEAEVFRLAGHPFNLNSRDQLERVLFDELRLPKLKKTKKTGKRSSSAAVLEALREAHPIVEKILQYRELTKLKSTYIDPLPDLIHPRTGRLHTRFNQTATATGRLSSSDPNLQNIPVRTPLGQRIRRAFIAEEGWLLVALDYSQIELRVLAHLSGDENLIRVFQEGRDIHTETASWMFGVPREAVDPLMRRAAKTINFGVLYGMSAHRLSQELAIPYEEAQAFIERYFQSFPKVRAWIEKTLEEGRRRGYVETLFGRRRYVPDLEARVKSVREAAERMAFNMPVQGTAADLMKLAMVKLFPRLEEMGARMLLQVANELVLEAPKERAEAVARLAKEVMEGVYPLAVPLEVEVGIGEDWLSAKEHHHHHH

SEQ ID NO: 229 - DNA, 2517 bp, Artificial Sequence
  Description of Artificial Sequence:  Synthetic
atgaattcggggatgctgcccctctttgagcccaagggccgggtcctcctggtggacggccaccacctggcctaccgcaccttccacgccctgaagggcctcaccaccagccggggggagccggtgcaggcggtctacggcttcgccaagagcctcctcaaggccctcaaggaggacggggacgcggtgatcgtggtctttgacgccaaggccccctccttccgccacgaggcctacggggggtacaaggcgggccgggcccccacgccggaggactttccccggcaactcgccctcatcaaggagctggtggacctcctggggttcacgcgcctcgaggtcccgggctacgaggcggacgacgtcctggccagcctggccaagaaggcggaaaaggagggctacgaggtccgcatcctcaccgccgacaaagacctttaccagctcctttccgaccgcatccacgtcctccaccccgaggggtacctcatcaccccggcctggctttgggaaaagtacggcctgaggcccgaccagtgggccgactaccgggccctgaccggggacgagtccgacaaccttcccggggtcaagggcatgggggagaagacggggaggaagcttctggaggagtgggggagcctggaagccctcctcaagaacctggaccggctgaagcccgccatccgggagaagatcctggcccacatggacgatctgaagctctcctgggacctggccaaggtgcgcaccgacctgcccctggaggtggacttcgccaaaaggcgggagcccgaccgggagaggcttagggcctttctggagaggcttgagtttggcagcctcctccacgagttcggccttctggaaagccccaaggccctggaggaggccccctggcccccgccggaaggggccttcgtgggctttgtgctttcccgcaaggagcccatgtgggccgatcttctggccctggccgccgccaggggcggccgcgtccaccgggcccccgagccttataaagccctcagggacctgaaggaggcgcgggggcttctcgccaaagacctgagcgttctggccctgagggaaggccttggcctcccgcccggcgacgaccccatgctcctcgcctacctcctggacccttcgaacaccacccccgagggggtggcccggcgctacggcggggagtggacggaggaggcgggggagcgggccgccctttccgagaggctcttcgccaacctgcttaagaggcttgagggggaggagaggctcctttggctttaccgggaggtggagaggcccctttccgctgtcctggcccatatggaggccacgggggtgcgcctggacgtggcctatctcagggccttgtccctggaggtggccgaggagatcgcccgcctcgaggccgaggtcttccgcctggccggccaccccttcaacctcaactcccgggaccagctggaaagggtcctctttgacgagctcaggcttcccaagttgaagaagacgaagaagaccggtaagcgctccagcagcgccgccgtcctggaggccctccgcgaggcccaccccatcgtggagaagatcctgcagtaccgggagctcaccaagctgaagagcacctacattgaccccttgccggacctcatccaccccaggacgggccgcctccacacccgcttcaaccagacggccacggccacgggcaggctaagtagctccgatcccaacctccagaacatccccgtccgcaccccgcttgggcagaggatccgccgggccttcatcgccgaggaggggtggctattggtggccctggactatagccagatagagctcagggtgctggcccacctctccggcgacgagaacctgatccgggtcttccaggaggggcgggacatccacacggagaccgccagctggatgttcggcgtcccccgggaggccgtggaccccctgatgcgccgggcggccaagaccatcaacttcggggtcctctacggcatgtcggcccaccgcctctcccaggagctagccatcccttacgaggaggcccaggccttcattgagcgctactttcagagcttccccaaggtgcgggcctggattgagaagaccctggaggagggcaggaggcgggggtacgtggagaccctcttcggccgccgccgctacgtgccagacctagaggcccgggtgaagagcgtgcgggaggcggccgagcgcatggccttcaacatgcccgtccagggcaccgccgccgacctcatgaagctggctatggtgaagctcttccccaggctggaggaaatgggggccaggatgctccttcaggtcgccaacgagctggtcctcgaggccccaaaagagagggcggaggccgtggcccggctggccaaggaggtcatggagggggtgtatcccctggccgtgcccctggaggtggaggtggggataggggaggactggctctccgccaaggagcaccaccaccaccaccac

SEQ ID NO: 230 - protein, 839 aa, Artificial Sequence
  Description of Artificial Sequence:  Synthetic
MNSGMLPLFEPKGRVLLVDGHHLAYRTFHALKGLTTSRGEPVQAVYGFAKSLLKALKEDGDAVIVVFDAKAPSFRHEAYGGYKAGRAPTPEDFPRQLALIKELVDLLGFTRLEVPGYEADDVLASLAKKAEKEGYEVRILTADKDLYQLLSDRIHVLHPEGYLITPAWLWEKYGLRPDQWADYRALTGDESDNLPGVKGMGEKTGRKLLEEWGSLEALLKNLDRLKPAIREKILAHMDDLKLSWDLAKVRTDLPLEVDFAKRREPDRERLRAFLERLEFGSLLHEFGLLESPKALEEAPWPPPEGAFVGFVLSRKEPMWADLLALAAARGGRVHRAPEPYKALRDLKEARGLLAKDLSVLALREGLGLPPGDDPMLLAYLLDPSNTTPEGVARRYGGEWTEEAGERAALSERLFANLLKRLEGEERLLWLYREVERPLSAVLAHMEATGVRLDVAYLRALSLEVAEEIARLEAEVFRLAGHPFNLNSRDQLERVLFDELRLPKLKKTKKTGKRSSSAAVLEALREAHPIVEKILQYRELTKLKSTYIDPLPDLIHPRTGRLHTRFNQTATATGRLSSSDPNLQNIPVRTPLGQRIRRAFIAEEGWLLVALDYSQIELRVLAHLSGDENLIRVFQEGRDIHTETASWMFGVPREAVDPLMRRAAKTINFGVLYGMSAHRLSQELAIPYEEAQAFIERYFQSFPKVRAWIEKTLEEGRRRGYVETLFGRRRYVPDLEARVKSVREAAERMAFNMPVQGTAADLMKLAMVKLFPRLEEMGARMLLQVANELVLEAPKERAEAVARLAKEVMEGVYPLAVPLEVEVGIGEDWLSAKEHHHHHH

SEQ ID NO: 231 - DNA, 2517 bp, Artificial Sequence
  Description of Artificial Sequence:  Synthetic
atgaattcggggatgctgcccctctttgagcccaagggccgggtcctcctggtggacggccaccacctggcctaccgcaccttccacgccctgaagggcctcaccaccagccggggggagccggtgcaggcggtctacggcttcgccaagagcctcctcaaggccctcaaggaggacggggacgcggtgatcgtggtctttgacgccaaggccccctccttccgccacgaggcctacggggggtacaaggcgggccgggcccccacgccggaggactttccccggcaactcgccctcatcaaggagctggtggacctcctggggttcacgcgcctcgaggtcccgggctacgaggcggacgacgtcctggccagcctggccaagaaggcggaaaaggagggctacgaggtccgcatcctcaccgccgacaaagacctttaccagctcctttccgaccgcatccacgtcctccaccccgaggggtacctcatcaccccggcctggctttgggaaaagtacggcctgaggcccgaccagtgggccgactaccgggccctgaccggggacgagtccgacaaccttcccggggtcaagggcatcggggagaatacggcgaggaagcttctggaggagtgggggagcctggaagccctcctcaagaacctggaccggctgaagcccgccatccgggagaagatcctggcccacatggacgatctgaagctctcctgggacctggccaaggtgcgcaccgacctgcccctggaggtggacttcgccaaaaggcgggagcccgaccgggagaggcttagggcctttctggagaggcttgagtttggcagcctcctccacgagttcggccttctggaaagccccaaggccctggaggaggccccctggcccccgccggaaggggccttcgtgggctttgtgctttcccgcaaggagcccatgtgggccgatcttctggccctggccgccgccaggggcggccgcgtccaccgggcccccgagccttataaagccctcagggacctgaaggaggcgcgggggcttctcgccaaagacctgagcgttctggccctgagggaaggccttggcctcccgcccggcgacgaccccatgctcctcgcctacctcctggacccttcgaacaccacccccgagggggtggcccggcgctacggcggggagtggacggaggaggcgggggagcgggccgccctttccgagaggctcttcgccaacctgcttaagaggcttgagggggaggagaggctcctttggctttaccgggaggtggagaggcccctttccgctgtcctggcccatatggaggccacgggggtgcgcctggacgtggcctatctcagggccttgtccctggaggtggccgaggagatcgcccgcctcgaggccgaggtcttccgcctggccggccaccccttcaacctcaactcccgggaccagctggaaagggtcctctttgacgagctcaggcttcccaagttgaagaagacgaagaagaccggtaagcgctccagcagcgccgccgtcctggaggccctccgcgaggcccaccccatcgtggagaagatcctgcagtaccgggagctcaccaagctgaagagcacctacattgaccccttgccggacctcatccaccccaggacgggccgcctccacacccgcttcaaccagacggccacggccacgggcaggctaagtagctccgatcccaacctccagaacatccccgtccgcaccccgcttgggcagaggatccgccgggccttcatcgccgaggaggggtggctattggtggccctggactatagccagatagagctcagggtgctggcccacctctccggcgacgagaacctgatccgggtcttccaggaggggcgggacatccacacggagaccgccagctggatgttcggcgtcccccgggaggccgtggaccccctgatgcgccgggcggccaagaccatcaacttcggggtcctctacggcatgtcggcccaccgcctctcccaggagctagccatcccttacgaggaggcccaggccttcattgagcgctactttcagagcttccccaaggtgcgggcctggattgagaagaccctggaggagggcaggaggcgggggtacgtggagaccctcttcggccgccgccgctacgtgccagacctagaggcccgggtgaagagcgtgcgggaggcggccgagcgcatggccttcaacatgcccgtccagggcaccgccgccgacctcatgaagctggctatggtgaagctcttccccaggctggaggaaatgggggccaggatgctccttcaggtcgccaacgagctggtcctcgaggccccaaaagagagggcggaggccgtggcccggctggccaaggaggtcatggagggggtgtatcccctggccgtgcccctggaggtggaggtggggataggggaggactggctctccgccaaggagcaccaccaccaccaccac

SEQ ID NO: 232 - protein, 839 aa, Artificial Sequence
  Description of Artificial Sequence:  Synthetic
MNSGMLPLFEPKGRVLLVDGHHLAYRTFHALKGLTTSRGEPVQAVYGFAKSLLKALKEDGDAVIVVFDAKAPSFRHEAYGGYKAGRAPTPEDFPRQLALIKELVDLLGFTRLEVPGYEADDVLASLAKKAEKEGYEVRILTADKDLYQLLSDRIHVLHPEGYLITPAWLWEKYGLRPDQWADYRALTGDESDNLPGVKGIGENTARKLLEEWGSLEALLKNLDRLKPAIREKILAHMDDLKLSWDLAKVRTDLPLEVDFAKRREPDRERLRAFLERLEFGSLLHEFGLLESPKALEEAPWPPPEGAFVGFVLSRKEPMWADLLALAAARGGRVHRAPEPYKALRDLKEARGLLAKDLSVLALREGLGLPPGDDPMLLAYLLDPSNTTPEGVARRYGGEWTEEAGERAALSERLFANLLKRLEGEERLLWLYREVERPLSAVLAHMEATGVRLDVAYLRALSLEVAEEIARLEAEVFRLAGHPFNLNSRDQLERVLFDELRLPKLKKTKKTGKRSSSAAVLEALREAHPIVEKILQYRELTKLKSTYIDPLPDLIHPRTGRLHTRFNQTATATGRLSSSDPNLQNIPVRTPLGQRIRRAFIAEEGWLLVALDYSQIELRVLAHLSGDENLIRVFQEGRDIHTETASWMFGVPREAVDPLMRRAAKTINFGVLYGMSAHRLSQELAIPYEEAQAFIERYFQSFPKVRAWIEKTLEEGRRRGYVETLFGRRRYVPDLEARVKSVREAAERMAFNMPVQGTAADLMKLAMVKLFPRLEEMGARMLLQVANELVLEAPKERAEAVARLAKEVMEGVYPLAVPLEVEVGIGEDWLSAKEHHHHHH

SEQ ID NO: 233 - DNA, 2517 bp, Artificial Sequence
  Description of Artificial Sequence:  Synthetic
atgaattcggggatgctgcccctctttgagcccaagggccgggtcctcctggtggacggccaccacctggcctaccgcaccttccacgccctgaagggcctcaccaccagccggggggagccggtgcaggcggtctacggcttcgccaagagcctcctcaaggccctcaaggaggacggggacgcggtgatcgtggtctttgacgccaaggccccctccttccgccacgaggcctacggggggtacaaggcgggccgggcccccacgccggaggactttccccggcaactcgccctcatcaaggagctggtggacctcctggggttcacgcgcctcgaggtcccgggctacgaggcggacgacgtcctggccagcctggccaagaaggcggaaaaggagggctacgaggtccgcatcctcaccgccgacaaagacctttaccagctcctttccgaccgcatccacgtcctccaccccgaggggtacctcatcaccccggcctggctttgggaaaagtacggcctgaggcccgaccagtgggccgactaccgggccctgaccggggacgagtccgacaaccttcccggggtcaagggcatcggggagaagccggcgaggaagcttctggaggagtgggggagcctggaagccctcctcaagaacctggaccggctgaagcccgccatccgggagaagatcctggcccacatggacgatctgaagctctcctgggacctggccaaggtgcgcaccgacctgcccctggaggtggacttcgccaaaaggcgggagcccgaccgggagaggcttagggcctttctggagaggcttgagtttggcagcctcctccacgagttcggccttctggaaagccccaaggccctggaggaggccccctggcccccgccggaaggggccttcgtgggctttgtgctttcccgcaaggagcccatgtgggccgatcttctggccctggccgccgccaggggcggccgcgtccaccgggcccccgagccttataaagccctcagggacctgaaggaggcgcgggggcttctcgccaaagacctgagcgttctggccctgagggaaggccttggcctcccgcccggcgacgaccccatgctcctcgcctacctcctggacccttcgaacaccacccccgagggggtggcccggcgctacggcggggagtggacggaggaggcgggggagcgggccgccctttccgagaggctcttcgccaacctgcttaagaggcttgagggggaggagaggctcctttggctttaccgggaggtggagaggcccctttccgctgtcctggcccatatggaggccacgggggtgcgcctggacgtggcctatctcagggccttgtccctggaggtggccgaggagatcgcccgcctcgaggccgaggtcttccgcctggccggccaccccttcaacctcaactcccgggaccagctggaaagggtcctctttgacgagctcaggcttcccaagttgaagaagacgaagaagaccggtaagcgctccagcagcgccgccgtcctggaggccctccgcgaggcccaccccatcgtggagaagatcctgcagtaccgggagctcaccaagctgaagagcacctacattgaccccttgccggacctcatccaccccaggacgggccgcctccacacccgcttcaaccagacggccacggccacgggcaggctaagtagctccgatcccaacctccagaacatccccgtccgcaccccgcttgggcagaggatccgccgggccttcatcgccgaggaggggtggctattggtggccctggactatagccagatagagctcagggtgctggcccacctctccggcgacgagaacctgatccgggtcttccaggaggggcgggacatccacacggagaccgccagctggatgttcggcgtcccccgggaggccgtggaccccctgatgcgccgggcggccaagaccatcaacttcggggtcctctacggcatgtcggcccaccgcctctcccaggagctagccatcccttacgaggaggcccaggccttcattgagcgctactttcagagcttccccaaggtgcgggcctggattgagaagaccctggaggagggcaggaggcgggggtacgtggagaccctcttcggccgccgccgctacgtgccagacctagaggcccgggtgaagagcgtgcgggaggcggccgagcgcatggccttcaacatgcccgtccagggcaccgccgccgacctcatgaagctggctatggtgaagctcttccccaggctggaggaaatgggggccaggatgctccttcaggtcgccaacgagctggtcctcgaggccccaaaagagagggcggaggccgtggcccggctggccaaggaggtcatggagggggtgtatcccctggccgtgcccctggaggtggaggtggggataggggaggactggctctccgccaaggagcaccaccaccaccaccac

SEQ ID NO: 234 - protein, 839 aa, Artificial Sequence
  Description of Artificial Sequence:  Synthetic
MNSGMLPLFEPKGRVLLVDGHHLAYRTFHALKGLTTSRGEPVQAVYGFAKSLLKALKEDGDAVIVVFDAKAPSFRHEAYGGYKAGRAPTPEDFPRQLALIKELVDLLGFTRLEVPGYEADDVLASLAKKAEKEGYEVRILTADKDLYQLLSDRIHVLHPEGYLITPAWLWEKYGLRPDQWADYRALTGDESDNLPGVKGIGEKPARKLLEEWGSLEALLKNLDRLKPAIREKILAHMDDLKLSWDLAKVRTDLPLEVDFAKRREPDRERLRAFLERLEFGSLLHEFGLLESPKALEEAPWPPPEGAFVGFVLSRKEPMWADLLALAAARGGRVHRAPEPYKALRDLKEARGLLAKDLSVLALREGLGLPPGDDPMLLAYLLDPSNTTPEGVARRYGGEWTEEAGERAALSERLFANLLKRLEGEERLLWLYREVERPLSAVLAHMEATGVRLDVAYLRALSLEVAEEIARLEAEVFRLAGHPFNLNSRDQLERVLFDELRLPKLKKTKKTGKRSSSAAVLEALREAHPIVEKILQYRELTKLKSTYIDPLPDLIHPRTGRLHTRFNQTATATGRLSSSDPNLQNIPVRTPLGQRIRRAFIAEEGWLLVALDYSQIELRVLAHLSGDENLIRVFQEGRDIHTETASWMFGVPREAVDPLMRRAAKTINFGVLYGMSAHRLSQELAIPYEEAQAFIERYFQSFPKVRAWIEKTLEEGRRRGYVETLFGRRRYVPDLEARVKSVREAAERMAFNMPVQGTAADLMKLAMVKLFPRLEEMGARMLLQVANELVLEAPKERAEAVARLAKEVMEGVYPLAVPLEVEVGIGEDWLSAKEHHHHHH

SEQ ID NO: 235 - DNA, 2517 bp, Artificial Sequence
  Description of Artificial Sequence:  Synthetic
atgaattcggggatgctgcccctctttgagcccaagggccgggtcctcctggtggacggccaccacctggcctaccgcaccttccacgccctgaagggcctcaccaccagccggggggagccggtgcaggcggtctacggcttcgccaagagcctcctcaaggccctcaaggaggacggggacgcggtgatcgtggtctttgacgccaaggccccctccttccgccacgaggcctacggggggtacaaggcgggccgggcccccacgccggaggactttccccggcaactcgccctcatcaaggagctggtggacctcctggggttcacgcgcctcgaggtcccgggctacgaggcggacgacgtcctggccagcctggccaagaaggcggaaaaggagggctacgaggtccgcatcctcaccgccgacaaagacctttaccagctcctttccgaccgcatccacgtcctccaccccgaggggtacctcatcaccccggcctggctttgggaaaagtacggcctgaggcccgaccagtgggccgactaccgggccctgaccggggacgagtccgacaaccttcccggggtcaagggcatcggggagaagacggcgaggaagcttctggaggagtgggggagcctggaagccctcctcaagaacctggaccggctgaagcccgccatccgggagaagatcctggcccacatggacgatctgaagctctcctgggacctggccaaggtgcgcaccgacctgcccctggaggtggacttcgccaaaaggcgggagcccgaccgggagaggcttagggcctttctggagaggcttgagtttggcagcctcctccacgagttcggccttctggaaagccccaaggccctggaggaggccccctggcccccgccggaaggggccttcgtgggctttgtgctttcccgcaaggagcccatgtgggccgatcttctggccctggccgccgccaggggcggccgcgtccaccgggcccccgagccttataaagccctcagggacctgaaggaggcgcgggggcttctcgccaaagacctgagcgttctggccctgagggaaggccttggcctcccgcccggcgacgaccccatgctcctcgcctacctcctggacccttcgaacaccacccccgagggggtggcccggcgctacggcggggagtggacggaggaggcgggggagcgggccgccctttccgagaggctcttcgccaacctgcttaagaggcttgagggggaggagaggctcctttggctttaccgggaggtggagaggcccctttccgctgtcctggcccatatggaggccacgggggtgcgcctggacgtggcctatctcagggccttgtccctggaggtggccgaggagatcgcccgcctcgaggccgaggtcttccgcctggccggccaccccttcaacctcaactcccgggaccagctggaaagggtcctctttgacgagctcaggcttcccaagttgaagaagacgaagaagaccggtaagcgctccagcagcgccgccgtcctggaggccctccgcgaggcccaccccatcgtggagaagatcctgcagtaccgggagctcaccaagctgaagagcacctacattgaccccttgccggacctcatccaccccaggacgggccgcctccacacccgcttcaaccagacggccacggccacgggcaggctaagtagctccgatcccaacctccagaacatccccgtccgcaccccgcttgggcagaggatccgccgggccttcatcgccgaggaggggtggctattggtggccctggactatagccagatagagctcagggtgctggcccacctctccggcgacgagaacctgatccgggtcttccaggaggggcgggacatccacacggagaccgccagctggatgttcggcgtcccccgggaggccgtggaccccctgatgcgccgggcggccaagaccatcaacttcggggtcctctacggcatgtcggcccacgccctctcccaggagctagccatcccttacgaggaggcccaggccttcattgagcgctactttcagagcttccccaaggtgcgggcctggattgagaagaccctggaggagggcaggaggcgggggtacgtggagaccctcttcggccgccgccgctacgtgccagacctagaggcccgggtgaagagcgtgcgggaggcggccgagcgcatggccttcaacatgcccgtccagggcaccgccgccgacctcatgaagctggctatggtgaagctcttccccaggctggaggaaatgggggccaggatgctccttcaggtcgccaacgagctggtcctcgaggccccaaaagagagggcggaggccgtggcccggctggccaaggaggtcatggagggggtgtatcccctggccgtgcccctggaggtggaggtggggataggggaggactggctctccgccaaggagcaccaccaccaccaccac

SEQ ID NO: 236 - protein, 839 aa, Artificial Sequence
  Description of Artificial Sequence:  Synthetic
MNSGMLPLFEPKGRVLLVDGHHLAYRTFHALKGLTTSRGEPVQAVYGFAKSLLKALKEDGDAVIVVFDAKAPSFRHEAYGGYKAGRAPTPEDFPRQLALIKELVDLLGFTRLEVPGYEADDVLASLAKKAEKEGYEVRILTADKDLYQLLSDRIHVLHPEGYLITPAWLWEKYGLRPDQWADYRALTGDESDNLPGVKGIGEKTARKLLEEWGSLEALLKNLDRLKPAIREKILAHMDDLKLSWDLAKVRTDLPLEVDFAKRREPDRERLRAFLERLEFGSLLHEFGLLESPKALEEAPWPPPEGAFVGFVLSRKEPMWADLLALAAARGGRVHRAPEPYKALRDLKEARGLLAKDLSVLALREGLGLPPGDDPMLLAYLLDPSNTTPEGVARRYGGEWTEEAGERAALSERLFANLLKRLEGEERLLWLYREVERPLSAVLAHMEATGVRLDVAYLRALSLEVAEEIARLEAEVFRLAGHPFNLNSRDQLERVLFDELRLPKLKKTKKTGKRSSSAAVLEALREAHPIVEKILQYRELTKLKSTYIDPLPDLIHPRTGRLHTRFNQTATATGRLSSSDPNLQNIPVRTPLGQRIRRAFIAEEGWLLVALDYSQIELRVLAHLSGDENLIRVFQEGRDIHTETASWMFGVPREAVDPLMRRAAKTINFGVLYGMSAHALSQELAIPYEEAQAFIERYFQSFPKVRAWIEKTLEEGRRRGYVETLFGRRRYVPDLEARVKSVREAAERMAFNMPVQGTAADLMKLAMVKLFPRLEEMGARMLLQVANELVLEAPKERAEAVARLAKEVMEGVYPLAVPLEVEVGIGEDWLSAKEHHHHHH

SEQ ID NO: 237 - DNA, 33 bp, Artificial Sequence
  Description of Artificial Sequence:  Synthetic
tagctcctgggagagggcgtgggccgacatgcc

SEQ ID NO: 238 - DNA, 2517 bp, Artificial Sequence
  Description of Artificial Sequence:  Synthetic
atgaattcggggatgctgcccctctttgagcccaagggccgggtcctcctggtggacggccaccacctggcctaccgcaccttccacgccctgaagggcctcaccaccagccggggggagccggtgcaggcggtctacggcttcgccaagagcctcctcaaggccctcaaggaggacggggacgcggtgatcgtggtctttgacgccaaggccccctccttccgccacgaggcctacggggggtacaaggcgggccgggcccccacgccggaggactttccccggcaactcgccctcatcaaggagctggtggacctcctggggctggcgcgcctcgaggtcccgggctacgaggcggacgacgtcctggccagcctggccaagaaggcggaaaaggagggctacgaggtccgcatcctcaccgccgacaaagacctttaccagctcctttccgaccgcatccacgtcctccaccccgaggggtacctcatcaccccggcctggctttgggaaaagtacggcctgaggcccgaccagtgggccgactaccgggccctgaccggggacgagtccgacaaccttcccggggtcaagggcatcggggagaagacggcgaggaagcttctggaggagtgggggagcctggaagccctcctcaagaacctggaccggctgaagcccgccatccgggagaagatcctggcccacatggacgatctgaagctctcctgggacctggccaaggtgcgcaccgacctgcccctggaggtggacttcgccaaaaggcgggagcccgaccgggagaggcttagggcctttctggagaggcttgagtttggcagcctcctccacgagttcggccttctggaaagccccaaggccctggaggaggccccctggcccccgccggaaggggccttcgtgggctttgtgctttcccgcaaggagcccatgtgggccgatcttctggccctggccgccgccaggggcggccgcgtgcaccgggcagcagaccccttggcggggctaaaggacctcaaggaggtccggggcctcctcgccaaggacctcgccgtcttggcctcgagggaggggctagacctcgtgcccggggacgaccccatgctcctcgcctacctcctggacccttcgaacaccacccccgagggggtggcgcggcgctacgggggggagtggacggaggacgccgcccaccgggccctcctctcggagaggctccatcggaacctccttaagcgcctcgagggggaggagaagctcctttggctctaccacgaggtggaaaagcccctctcccgggtcctggcccatatggaggccaccggggtacggcgggacgtggcctaccttcaggccctttccctggagcttgcggaggagatccgccgcctcgaggaggaggtcttccgcttggcgggccaccccttcaacctcaactcccgggaccagctggaaagggtgctctttgacgagcttaggcttcccgccttgaagaagacgaagaagacaggcaagcgctccaccagcgccgcggtgctggaggccctacgggaggcccaccccatcgtggagaagatcctccagcaccgggagctcaccaagctcaagaacacctacgtggaccccctcccaagcctcgtccacccgaggacgggccgcctccacacccgcttcaaccagacggccacggccacggggaggcttagtagctccgaccccaacctgcagaacatccccgtccgcacccccttgggccagaggatccgccgggccttcgtggccgaggcgggttgggcgttggtggccctggactatagccagatagagctccgcgtcctcgcccacctctccggggacgaaaacctgatcagggtcttccaggaggggaaggacatccacacccagaccgcaagctggatgttcggcgtccccccggaggccgtggaccccctgatgcgccgggcggccaagacggtgaacttcggcgtcctctacggcatgtccgcccataggctctcccaggagcttgccatcccctacgaggaggcggtggcctttatagagcgctacttccaaagcttccccaaggtgcgggcctggatagaaaagaccctggaggaggggaggaagcggggctacgtggaaaccctcttcggaagaaggcgctacgtgcccgacctcaacgcccgggtgaagagcgtcagggaggccgcggagcgcatggccttcaacatgcccgtccagggcaccgccgccgacctcatgaagctcgccatggtgaagctcttcccccgcctccgggagatgggggcccgcatgctcctccaggtcgccaacgagctcctcctggaggccccccaagcgcgggccgaggaggtggcggctttggccaaggaggccatggagaaggcctatcccctcgccgtgcccctggaggtggaggtggggatgggggaggactggctttccgccaagggtcaccaccaccaccaccac

SEQ ID NO: 239 - protein, 839 aa, Artificial Sequence
  Description of Artificial Sequence:  Synthetic
MNSGMLPLFEPKGRVLLVDGHHLAYRTFHALKGLTTSRGEPVQAVYGFAKSLLKALKEDGDAVIVVFDAKAPSFRHEAYGGYKAGRAPTPEDFPRQLALIKELVDLLGLARLEVPGYEADDVLASLAKKAEKEGYEVRILTADKDLYQLLSDRIHVLHPEGYLITPAWLWEKYGLRPDQWADYRALTGDESDNLPGVKGIGEKTARKLLEEWGSLEALLKNLDRLKPAIREKILAHMDDLKLSWDLAKVRTDLPLEVDFAKRREPDRERLRAFLERLEFGSLLHEFGLLESPKALEEAPWPPPEGAFVGFVLSRKEPMWADLLALAAARGGRVHRAADPLAGLKDLKEVRGLLAKDLAVLASREGLDLVPGDDPMLLAYLLDPSNTTPEGVARRYGGEWTEDAAHRALLSERLHRNLLKRLEGEEKLLWLYHEVEKPLSRVLAHMEATGVRRDVAYLQALSLELAEEIRRLEEEVFRLAGHPFNLNSRDQLERVLFDELRLPALKKTKKTGKRSTSAAVLEALREAHPIVEKILQHRELTKLKNTYVDPLPSLVHPRTGRLHTRFNQTATATGRLSSSDPNLQNIPVRTPLGQRIRRAFVAEAGWALVALDYSQIELRVLAHLSGDENLIRVFQEGKDIHTQTASWMFGVPPEAVDPLMRRAAKTVNFGVLYGMSAHRLSQELAIPYEEAVAFIERYFQSFPKVRAWIEKTLEEGRKRGYVETLFGRRRYVPDLNARVKSVREAAERMAFNMPVQGTAADLMKLAMVKLFPRLREMGARMLLQVANELLLEAPQARAEEVAALAKEAMEKAYPLAVPLEVEVGMGEDWLSAKGHHHHHH

SEQ ID NO: 240 - DNA, 2526 bp, Artificial Sequence
  Description of Artificial Sequence:  Synthetic
atgaattccgaggcgatgcttccgctctttgaacccaaaggccgggtcctcctggtggacggccaccacctggcctaccgcaccttcttcgccctgaagggcctcaccacgagccggggcgaaccggtgcaggcggtctacggcttcgccaagagcctcctcaaggccctgaaggaggacgggtacaaggccgtcttcgtggtctttgacgccaaggccccctccttccgccacgaggcctacgaggcctacaaggcggggagggccccgacccccgaggacttcccccggcagctcgccctcatcaaggagctggtggacctcctggggtttacccgcctcgaggtccccggctacgaggcggacgacgttctcgccaccctggccaagaaggcggaaaaggaggggtacgaggtgcgcatcctcaccgccgaccgcgacctctaccaactcgtctccgaccgcgtcgccgtcctccaccccgagggccacctcatcaccccggagtggctttgggagaagtacggcctcaggccggagcagtgggtggacttccgcgccctcgtgggggacccctccgacaacctccccggggtcaagggcatcggggagaagaccgccctcaagctcctcaaggagtggggaagcctggaaaacctcctcaagaacctggaccgggtaaagccagaaaacgtccgggagaagatcaaggcccacctggaagacctcaggctctccttggagctctcccgggtgcgcaccgacctccccctggaggtggacctcgcccaggggcgggagcccgaccgggaggggcttagggccttcctggagaggctggagttcggcagcctcctccacgagttcggcctcctggaggcccccgcccccctggaggaggccccctggcccccgccggaaggggccttcgtgggcttcgtcctctcccgccccgagcccatgtgggcggagcttaaagccctggccgcctgcaggggcggccgcgtccaccgggcccccgagccttataaagccctcagggacctgaaggaggcgcgggggcttctcgccaaagacctgagcgttctggccctgagggaaggccttggcctcccgcccggcgacgaccccatgctcctcgcctacctcctggacccttcgaacaccacccccgagggggtggcccggcgctacggcggggagtggacggaggaggcgggggagcgggccgccctttccgagaggctcttcgccaacctgcttaagaggcttgagggggaggagaggctcctttggctttaccgggaggtggagaggcccctttccgctgtcctggcccatatggaggccacgggggtgcgcctggacgtggcctatctcagggccttgtccctggaggtggccgaggagatcgcccgcctcgaggccgaggtcttccgcctggccggccaccccttcaacctcaactcccgggaccagctggaaagggtcctctttgacgagctagggcttcccgccatcaagaagacgcaaaagaccggcaagcgctccaccagcgccgccgtcctggaggccctccgcgaggcccaccccatcgtggagaagatcctgcagtaccgggagctcaccaagctgaagagcacctacattgaccccttgccggacctcatccaccccaggacgggccgcctccacacccgcttcaaccagacggccacggccacgggcaggctaagtagctccgatcccaacctccagaacatccccgtccgcaccccgcttgggcagaggatccgccgggccttcatcgccgaggaggggtggctattggtggccctggactatagccagatagagctcagggtgctggcccacctctccggcgacgagaacctgatccgggtcttccaggaggggcgggacatccacacggagaccgccagctggatgttcggcgtcccccgggaggccgtggaccccctgatgcgccgggcggccaagaccatcaacttcggggtcctctacggcatgtcggcccaccgcctctcccaggagctagccatcccttacgaggaggcccaggccttcattgagcgctactttcagagcttccccaaggtgcgggcctggattgagaagaccctggaggagggcaggaggcgggggtacgtggagaccctcttcggccgccgccgctacgtgccagacctagaggcccgggtgaagagcgtgcgggaggcggccgagcgcatggccttcaacatgcccgtccagggcaccgccgccgacctcatgaagctggctatggtgaagctcttccccaggctggaggaaatgggggccaggatgctccttcaggtcgccaacgagctggtcctcgaggccccaaaagagagggcggaggccgtggcccggctggccaaggaggtcatggagggggtgtatcccctggccgtgcccctggaggtggaggtggggataggggaggactggctctccgccaaggagcaccaccaccaccaccac

SEQ ID NO: 241 - protein, 842 aa, Artificial Sequence
  Description of Artificial Sequence:  Synthetic
MNSEAMLPLFEPKGRVLLVDGHHLAYRTFFALKGLTTSRGEPVQAVYGFAKSLLKALKEDGYKAVFVVFDAKAPSFRHEAYEAYKAGRAPTPEDFPRQLALIKELVDLLGFTRLEVPGYEADDVLATLAKKAEKEGYEVRILTADRDLYQLVSDRVAVLHPEGHLITPEWLWEKYGLRPEQWVDFRALVGDPSDNLPGVKGIGEKTALKLLKEWGSLENLLKNLDRVKPENVREKIKAHLEDLRLSLELSRVRTDLPLEVDLAQGREPDREGLRAFLERLEFGSLLHEFGLLEAPAPLEEAPWPPPEGAFVGFVLSRPEPMWAELKALAACRGGRVHRAPEPYKALRDLKEARGLLAKDLSVLALREGLGLPPGDDPMLLAYLLDPSNTTPEGVARRYGGEWTEEAGERAALSERLFANLLKRLEGEERLLWLYREVERPLSAVLAHMEATGVRLDVAYLRALSLEVAEEIARLEAEVFRLAGHPFNLNSRDQLERVLFDELGLPAIKKTQKTGKRSTSAAVLEALREAHPIVEKILQYRELTKLKSTYIDPLPDLIHPRTGRLHTRFNQTATATGRLSSSDPNLQNIPVRTPLGQRIRRAFIAEEGWLLVALDYSQIELRVLAHLSGDENLIRVFQEGRDIHTETASWMFGVPREAVDPLMRRAAKTINFGVLYGMSAHRLSQELAIPYEEAQAFIERYFQSFPKVRAWIEKTLEEGRRRGYVETLFGRRRYVPDLEARVKSVREAAERMAFNMPVQGTAADLMKLAMVKLFPRLEEMGARMLLQVANELVLEAPKERAEAVARLAKEVMEGVYPLAVPLEVEVGIGEDWLSAKEHHHHHH

SEQ ID NO: 242 - DNA, 2508 bp, Artificial Sequence
  Description of Artificial Sequence:  Synthetic
atggaattcaccccactttttgacctggaggaaccccccaagcgggtgcttctggtggacggccaccacctggcctaccgcaccttctatgccctgagcctcaccacctcccggggggagccggtgcagatggtctacggcttcgcccggagcctcctcaaggccttgaaggaggacggacaggcggtggtcgtggtctttgacgccaaggccccctccttccgccacgaggcctacgaggcctacaaggcgggccgggcccccaccccggaggacttcccccgccagctcgccttggtcaagcggctggtggaccttctgggcctggtccgcctcgaggccccggggtacgaggcggacgacgtcctgggcaccctggccaagaaggccgaaagggaggggatggaggtgcgcatcctcacgggagaccgggacttcttccagctcctctccgagaaggtctcggtcctcctgccggacgggaccctggtcaccccaaaggacgtccaggagaagtacggggtgcccccggagcgctgggtggacttccgcgccctcacgggggaccgctcggacaacatccccggggtggcggggataggggagaagaccgcccttcgactcctcgcagagtgggggagcgtggaaaacctcctgaagaacctggaccgggtaaagccggactcgctccggcgcaagatagaggcgcacctcgaggacctccacctctccttagacctggcccgcatccgcaccgacctccccctggaggtggactttaaggccctgcgccgcaggacccccgacctggagggcctgagggcctttttggaggagctggagttcggaagcctcctccacgagttcggcctcctgggaggggagaagccccgggaggaggccccctggcccccgcccgaaggggccttcgtgggcttcctcctttcccgcaaggagcccatgtgggcggagcttctggccctggcggcggcctcggagggccgggtccaccgggcaacaagcccggttgaggccctggccgacctcaaggaggcccgggggttcctggccaaggacctggccgttttggccctgcgggagggggtggccctggaccccacggacgaccccctcctggtggcctacctcctggacccggccaacacccaccccgagggggtggcccggcgctacgggggcgagttcacggaggacgcagcggagagggccctcctctccgagaggctcttccagaacctctttaaacggctttccgagaagctcctctggctctaccaggaggtggagcggcccctctcccgggtcttggcccacatggaggcccggggggtgaggctggacgtcccccttctggaggccctctcctttgagctggagaaggagatggagcgcctggagggggaggtcttccgtttggccggccaccccttcaacctcaactcccgcgaccagctggaaagggtcctctttgacgagctgggcctcaccccggtgggccggacgcagaagacgggcaagcgctccaccgcccagggggccctggaggccctccggggggcccaccccatcgtggagctcatcctccagtaccgggagctttccaagctcaaaagcacctacctggaccccctgccccggctcgtccacccgcggacgggccggctccacacccgcttcaaccagacggccacggccacgggaaggctttccagctccgaccccaacctgcagaacatccccgtgcgcacccccttggggcagcgcatccgcaaggccttcgtggccgaggaggggtggctccttttggcggcggactactcccagattgagctccgggtcctggcccacctctcgggggacgagaacctgaagcgggtcttccgggaggggaaggacatccataccgagaccgccgcctggatgttcggcttagaccccgctctggtggatccaaagatgcgccgggcggccaagacggtcaacttcggcgtcctctacgggatgtccgcccacaggctctcccaggagctcggcatagactacaaggaggcggaggcctttattgagcgctacttccagagcttccccaaggtgcgggcctggatagaaaggaccctggaggagggccggacgcggggctacgtggagaccctgttcggcaggaggcgctatgtgcccgacctggcctcccgggtccgctcggtgcgggaggcggcggagcggatggccttcaacatgcccgtgcagggcaccgccgccgacctgatgaagatcgccatggtcaagctcttccccaggctaaagcccctgggggcccacctcctcctccaagtgcacaacgagctggtcctggaggtgcccgaggaccgggccgaggaggccaaggccctggtcaaggaggtcatggagaacgcctaccccctggacgtgcccctcgaggtggaggtgggcgtgggtcgggactggctggaggcgaagcaggattga

SEQ ID NO: 243 - protein, 835 aa, Artificial Sequence
  Description of Artificial Sequence:  Synthetic
MEFTPLFDLEEPPKRVLLVDGHHLAYRTFYALSLTTSRGEPVQMVYGFARSLLKALKEDGQAVVVVFDAKAPSFRHEAYEAYKAGRAPTPEDFPRQLALVKRLVDLLGLVRLEAPGYEADDVLGTLAKKAEREGMEVRILTGDRDFFQLLSEKVSVLLPDGTLVTPKDVQEKYGVPPERWVDFRALTGDRSDNIPGVAGIGEKTALRLLAEWGSVENLLKNLDRVKPDSLRRKIEAHLEDLHLSLDLARIRTDLPLEVDFKALRRRTPDLEGLRAFLEELEFGSLLHEFGLLGGEKPREEAPWPPPEGAFVGFLLSRKEPMWAELLALAAASEGRVHRATSPVEALADLKEARGFLAKDLAVLALREGVALDPTDDPLLVAYLLDPANTHPEGVARRYGGEFTEDAAERALLSERLFQNLFKRLSEKLLWLYQEVERPLSRVLAHMEARGVRLDVPLLEALSFELEKEMERLEGEVFRLAGHPFNLNSRDQLERVLFDELGLTPVGRTQKTGKRSTAQGALEALRGAHPIVELILQYRELSKLKSTYLDPLPRLVHPRTGRLHTRFNQTATATGRLSSSDPNLQNIPVRTPLGQRIRKAFVAEEGWLLLAADYSQIELRVLAHLSGDENLKRVFREGKDIHTETAAWMFGLDPALVDPKMRRAAKTVNFGVLYGMSAHRLSQELGIDYKEAEAFIERYFQSFPKVRAWIERTLEEGRTRGYVETLFGRRRYVPDLASRVRSVREAAERMAFNMPVQGTAADLMKIAMVKLFPRLKPLGAHLLLQVHNELVLEVPEDRAEEAKALVKEVMENAYPLDVPLEVEVGVGRDWLEAKQD

SEQ ID NO: 244 - DNA, 34 bp, Artificial Sequence
  Description of Artificial Sequence:  Synthetic
cttccagaacctctttaaacggctttccgagaag

SEQ ID NO: 245 - DNA, 34 bp, Artificial Sequence
  Description of Artificial Sequence:  Synthetic
cttctcggaaagccgtttaaagaggttctggaag

SEQ ID NO: 246 - DNA, 31 bp, Artificial Sequence
  Description of Artificial Sequence:  Synthetic
ccggtgggccggacgcagaagacgggcaagc

SEQ ID NO: 247 - DNA, 31 bp, Artificial Sequence
  Description of Artificial Sequence:  Synthetic
gcttgcccgtcttctgcgtccggcccaccgg

SEQ ID NO: 248 - DNA, 31 bp, Artificial Sequence
  Description of Artificial Sequence:  Synthetic
ctcctccaagtgcacaacgagctggtcctgg

SEQ ID NO: 249 - DNA, 31 bp, Artificial Sequence
  Description of Artificial Sequence:  Synthetic
ccaggaccagctcgttgtgcacttggaggag

SEQ ID NO: 250 - DNA, 2499 bp, Artificial Sequence
  Description of Artificial Sequence:  Synthetic
atggaattcctgcccctctttgagcccaagggccgggtgcttctggtggacggccaccacctggcctaccgtaccttttttgccctgaagggcctcaccaccagccgcggggagccggtccaggcggtgtacgggtttgccaagagccttttgaaggcgctaagggaagacggggatgtggtgatcgtggtgtttgacgccaaggccccctccttccgccaccagacctacgaggcctacaaggcggggcgggctcccacccccgaggactttccccggcagcttgcccttatcaaggagatggtggaccttttgggcctggagcgcctcgaggtgccgggctttgaagcggatgacgtcctggctaccctggccaagaaggcggaaaaggaaggctacgaagtgcgcatcctcaccgcggaccgggacctttaccagcttctttcggagcgaatctccatccttcacccggagggttacctgatcaccccggagtggctttgggagaagtatgggcttaagccttcccagtgggtggactaccgggccttggccggggacccttccgacaacatccccggcgtgaagggcatcggggagaagacggcggccaagctgatccgggagtggggaagcctggaaaaccttcttaagcacctggaacaggtgaaacctgcctccgtgcgggagaagatccttagccacatggaggacctcaagctatccctggagctatcccgggtgcacacggacttgctccttcaggtggacttcgcccggcgccgggagccggaccgggaggggcttaaggcctttttggagaggctggagttcggaagcctcctccacgagttcggcctgttggaaagcccggtggcggcggaggaagctccctggccgccccccgagggagccttcgtggggtacgttctttcccgccccgagcccatgtgggcggagcttaacgccttggccgccgcctgggagggaagggtttaccgggcggaggatcccttggaggccttgcgggggcttggggaggtgagggggcttttggccaaggacctggcggtgctggccctgagggaagggattgccctggcaccgggcgacgaccccatgctcctcgcctacctcctggatccttccaacaccgcccccgaaggggtagcccggcgctacgggggggagtggaccgaggaggcgggggaaagggcgctgctttccgaaaggctttacgccgccctcctgaagcggcttaagggggaggagaggcttctttggctttacgaggaggtggaaaagcccctttcgcgggtcctggcccacatggaggccacgggggtacggttggatgtggcctacttaaaggccctttccctggaggtggaggcggagataaggcgcttcgaggaggaggtccaccgcctggccgggcatcctttcaacctgaactcccgggaccagctggaaagggtcatctttgacgagcttgggcttcccgccatcggcaagacgcagaagacgggcaagcgctccaccagcgccgccgttttggaggccttgcgggaggctcatcccatcgtggaccgcatccttcagtaccgggagctttccaagctcaagggaacctacatcgatcccttgcctgccctggtccaccccaagacgaaccgcctccacacccgtttcaaccagacggccaccgccacggggaggcttagcagctcggatcctaatctgcaaaatatccccgtgcgcacccctttgggccagcggatccgccgggccttcgtggccgaggaggggtggaggctggtggttttggactacagccagattgagctcagggtcctggcgcacctttccggggacgagaacctaatccgggtcttccaggagggccaggacatccacacccagacggccagctggatgttcggcgtgcccccagaggccgtggattccctgatgcgccgggcggccaagaccatcaacttcggcgtcctctacggcatgtccgcccaccggctttcgggagagctggccatcccctacgaggaggcggtggccttcatcgagcggtatttccagagctaccccaaggtgcgggcctggattgagaaaaccctggcggaaggacgggaacggggctatgtggaaaccctctttggccgccggcgctacgtgcccgacttggcttcccgggtgaagagcatccgggaggcagcggagcgcatggccttcaacatgccggtccaggggaccgccgcggatttgatgaaactggccatggtgaagctctttcccaggcttcaggagctgggggccaggatgcttttgcaggtgcacaacgaactggtcctcgaggctcccaaggagcaagcggaggaagtcgcccaggaggccaagcggaccatggaggaggtgtggcccctgaaggtgcccttggaggtggaagtgggcatcggggaggactggctttccgccaaggcctag

SEQ ID NO: 251 - protein, 832 aa, Artificial Sequence
  Description of Artificial Sequence:  Synthetic
MEFLPLFEPKGRVLLVDGHHLAYRTFFALKGLTTSRGEPVQAVYGFAKSLLKALREDGDVVIVVFDAKAPSFRHQTYEAYKAGRAPTPEDFPRQLALIKEMVDLLGLERLEVPGFEADDVLATLAKKAEKEGYEVRILTADRDLYQLLSERISILHPEGYLITPEWLWEKYGLKPSQWVDYRALAGDPSDNIPGVKGIGEKTAAKLIREWGSLENLLKHLEQVKPASVREKILSHMEDLKLSLELSRVHTDLLLQVDFARRREPDREGLKAFLERLEFGSLLHEFGLLESPVAAEEAPWPPPEGAFVGYVLSRPEPMWAELNALAAAWEGRVYRAEDPLEALRGLGEVRGLLAKDLAVLALREGIALAPGDDPMLLAYLLDPSNTAPEGVARRYGGEWTEEAGERALLSERLYAALLKRLKGEERLLWLYEEVEKPLSRVLAHMEATGVRLDVAYLKALSLEVEAEIRRFEEEVHRLAGHPFNLNSRDQLERVIFDELGLPAIGKTQKTGKRSTSAAVLEALREAHPIVDRILQYRELSKLKGTYIDPLPALVHPKTNRLHTRFNQTATATGRLSSSDPNLQNIPVRTPLGQRIRRAFVAEEGWRLVVLDYSQIELRVLAHLSGDENLIRVFQEGQDIHTQTASWMFGVPPEAVDSLMRRAAKTINFGVLYGMSAHRLSGELAIPYEEAVAFIERYFQSYPKVRAWIEKTLAEGRERGYVETLFGRRRYVPDLASRVKSIREAAERMAFNMPVQGTAADLMKLAMVKLFPRLQELGARMLLQVHNELVLEAPKEQAEEVAQEAKRTMEEVWPLKVPLEVEVGIGEDWLSAKA

SEQ ID NO: 252 - DNA, 26 bp, Artificial Sequence
  Description of Artificial Sequence:  Synthetic
gccgccctcctgaagcggcttaaggg

SEQ ID NO: 253 - DNA, 26 bp, Artificial Sequence
  Description of Artificial Sequence:  Synthetic
cccttaagccgcttcaggagggcggc

SEQ ID NO: 254 - DNA, 28 bp, Artificial Sequence
  Description of Artificial Sequence:  Synthetic
atcggcaagacgcagaagacgggcaagc

SEQ ID NO: 255 - DNA, 28 bp, Artificial Sequence
  Description of Artificial Sequence:  Synthetic
gcttgcccgtcttctgcgtcttgccgat

SEQ ID NO: 256 - DNA, 27 bp, Artificial Sequence
  Description of Artificial Sequence:  Synthetic
ttgcaggtgcacaacgaactggtcctc

SEQ ID NO: 257 - DNA, 27 bp, Artificial Sequence
  Description of Artificial Sequence:  Synthetic
gaggaccagttcgttgtgcacctgcaa

SEQ ID NO: 258 - DNA, 2526 bp, Artificial Sequence
  Description of Artificial Sequence:  Synthetic
atgaattccaccccactttttgacctggaggaaccccccaagcgggtgcttctggtggacggccaccacctggcctaccgcaccttctatgccctgagcctcaccacctcccggggggagccggtgcagatggtctacggcttcgcccggagcctcctcaaggccttgaaggaggacggacaggcggtggtcgtggtctttgacgccaaggccccctccttccgccacgaggcctacgaggcctacaaggcgggccgggcccccaccccggaggacttcccccgccagctcgccttggtcaagcggctggtggaccttctgggcctggtccgcctcgaggccccggggtacgaggcggacgacgtcctgggcaccctggccaagaaggccgaaagggaggggatggaggtgcgcatcctcacgggagaccgggacttcttccagctcctctccgagaaggtctcggtcctcctgccggacgggaccctggtcaccccaaaggacgtccaggagaagtacggggtgcccccggagcgctgggtggacttccgcgccctcacgggggaccgctcggacaacatccccggggtggcggggataggggagaagaccgcccttcgactcctcgcagagtgggggagcgtggaaaacctcctgaagaacctggaccgggtaaagccggactcgctccggcgcaagatagaggcgcacctcgaggacctccacctctccttagacctggcccgcatccgcaccgacctccccctggaggtggactttaaggccctgcgccgcaggacccccgacctggagggcctgagggcctttttggaggagctggagttcggaagcctcctccacgagttcggcctcctgggaggggagaagccccgggaggaggccccctggcccccgcccgaaggggccttcgtgggcttcctcctttcccgcaaggagcccatgtgggcggagcttctggccctggcggcggcctcgggcggccgcgtgcaccgggcagcagaccccttggcggggctaaaggacctcaaggaggtccggggcctcctcgccaaggacctcgccgtcttggcctcgagggaggggctagacctcgtgcccggggacgaccccatgctcctcgcctacctcctggacccttcgaacaccacccccgagggggtggcgcggcgctacgggggggagtggacggaggacgccgcccaccgggccctcctctcggagaggctccatcggaacctccttaagcgcctcgagggggaggagaagctcctttggctctaccacgaggtggaaaagcccctctcccgggtcctggcccatatggaggccaccggggtacggcgggacgtggcctaccttcaggccctttccctggagcttgcggaggagatccgccgcctcgaggaggaggtcttccgcttggcgggccaccccttcaacctcaactcccgggaccagctggaaagggtgctctttgacgagcttaggcttcccgccttgaagaagacgaagaagacaggcaagcgctccaccagcgccgcggtgctggaggccctacgggaggcccaccccatcgtggagaagatcctccagcaccgggagctcaccaagctcaagaacacctacgtggaccccctcccaagcctcgtccacccgaggacgggccgcctccacacccgcttcaaccagacggccacggccacggggaggcttagtagctccgaccccaacctgcagaacatccccgtccgcacccccttgggccagaggatccgccgggccttcgtggccgaggcgggttgggcgttggtggccctggactatagccagatagagctccgcgtcctcgcccacctctccggggacgaaaacctgatcagggtcttccaggaggggaaggacatccacacccagaccgcaagctggatgttcggcgtccccccggaggccgtggaccccctgatgcgccgggcggccaagacggtgaacttcggcgtcctctacggcatgtccgcccataggctctcccaggagcttgccatcccctacgaggaggcggtggcctttatagagcgctacttccaaagcttccccaaggtgcgggcctggatagaaaagaccctggaggaggggaggaagcggggctacgtggaaaccctcttcggaagaaggcgctacgtgcccgacctcaacgcccgggtgaagagcgtcagggaggccgcggagcgcatggccttcaacatgcccgtccagggcaccgccgccgacctcatgaagctcgccatggtgaagctcttcccccgcctccgggagatgggggcccgcatgctcctccaggtcgccaacgagctcctcctggaggccccccaagcgcgggccgaggaggtggcggctttggccaaggaggccatggagaaggcctatcccctcgccgtgcccctggaggtggaggtggggatgggggaggactggctttccgccaagggtcaccaccaccaccaccac

SEQ ID NO: 259 - protein, 842 aa, Artificial Sequence
  Description of Artificial Sequence:  Synthetic
MNSTPLFDLEEPPKRVLLVDGHHLAYRTFYALSLTTSRGEPVQMVYGFARSLLKALKEDGQAVVVVFDAKAPSFRHEAYEAYKAGRAPTPEDFPRQLALVKRLVDLLGLVRLEAPGYEADDVLGTLAKKAEREGMEVRILTGDRDFFQLLSEKVSVLLPDGTLVTPKDVQEKYGVPPERWVDFRALTGDRSDNIPGVAGIGEKTALRLLAEWGSVENLLKNLDRVKPDSLRRKIEAHLEDLHLSLDLARIRTDLPLEVDFKALRRRTPDLEGLRAFLEELEFGSLLHEFGLLGGEKPREEAPWPPPEGAFVGFLLSRKEPMWAELLALAAASGGRVHRAADPLAGLKDLKEVRGLLAKDLAVLASREGLDLVPGDDPMLLAYLLDPSNTTPEGVARRYGGEWTEDAAHRALLSERLHRNLLKRLEGEEKLLWLYHEVEKPLSRVLAHMEATGVRRDVAYLQALSLELAEEIRRLEEEVFRLAGHPFNLNSRDQLERVLFDELRLPALKKTKKTGKRSTSAAVLEALREAHPIVEKILQHRELTKLKNTYVDPLPSLVHPRTGRLHTRFNQTATATGRLSSSDPNLQNIPVRTPLGQRIRRAFVAEAGWALVALDYSQIELRVLAHLSGDENLIRVFQEGKDIHTQTASWMFGVPPEAVDPLMRRAAKTVNFGVLYGMSAHRLSQELAIPYEEAVAFIERYFQSFPKVRAWIEKTLEEGRKRGYVETLFGRRRYVPDLNARVKSVREAAERMAFNMPVQGTAADLMKLAMVKLFPRLREMGARMLLQVANELLLEAPQARAEEVAALAKEAMEKAYPLAVPLEVEVGMGEDWLSAKGHHHHHH

SEQ ID NO: 260 - DNA, 2514 bp, Artificial Sequence
  Description of Artificial Sequence:  Synthetic
atgaattccctgcccctctttgagcccaagggccgggtgcttctggtggacggccaccacctggcctaccgtaccttttttgccctgaagggcctcaccaccagccgcggggagccggtccaggcggtgtacgggtttgccaagagccttttgaaggcgctaagggaagacggggatgtggtgatcgtggtgtttgacgccaaggccccctccttccgccaccagacctacgaggcctacaaggcggggcgggctcccacccccgaggactttccccggcagcttgcccttatcaaggagatggtggaccttttgggcctggagcgcctcgaggtgccgggctttgaagcggatgacgtcctggctaccctggccaagaaggcggaaaaggaaggctacgaagtgcgcatcctcaccgcggaccgggacctttaccagcttctttcggagcgaatctccatccttcacccggagggttacctgatcaccccggagtggctttgggagaagtatgggcttaagccttcccagtgggtggactaccgggccttggccggggacccttccgacaacatccccggcgtgaagggcatcggggagaagacggcggccaagctgatccgggagtggggaagcctggaaaaccttcttaagcacctggaacaggtgaaacctgcctccgtgcgggagaagatccttagccacatggaggacctcaagctatccctggagctatcccgggtgcacacggacttgctccttcaggtggacttcgcccggcgccgggagccggaccgggaggggcttaaggcctttttggagaggctggagttcggaagcctcctccacgagttcggcctgttggaaagcccggtggcggcggaggaagctccctggccgccccccgagggagccttcgtggggtacgttctttcccgccccgagcccatgtgggcggagcttaacgccttggccgccgcctggggcggccgcgtgcaccgggcagcagaccccttggcggggctaaaggacctcaaggaggtccggggcctcctcgccaaggacctcgccgtcttggcctcgagggaggggctagacctcgtgcccggggacgaccccatgctcctcgcctacctcctggacccttcgaacaccacccccgagggggtggcgcggcgctacgggggggagtggacggaggacgccgcccaccgggccctcctctcggagaggctccatcggaacctccttaagcgcctcgagggggaggagaagctcctttggctctaccacgaggtggaaaagcccctctcccgggtcctggcccatatggaggccaccggggtacggcgggacgtggcctaccttcaggccctttccctggagcttgcggaggagatccgccgcctcgaggaggaggtcttccgcttggcgggccaccccttcaacctcaactcccgggaccagctggaaagggtgctctttgacgagcttaggcttcccgccttgaagaagacgaagaagacaggcaagcgctccaccagcgccgcggtgctggaggccctacgggaggcccaccccatcgtggagaagatcctccagcaccgggagctcaccaagctcaagaacacctacgtggaccccctcccaagcctcgtccacccgaggacgggccgcctccacacccgcttcaaccagacggccacggccacggggaggcttagtagctccgaccccaacctgcagaacatccccgtccgcacccccttgggccagaggatccgccgggccttcgtggccgaggcgggttgggcgttggtggccctggactatagccagatagagctccgcgtcctcgcccacctctccggggacgaaaacctgatcagggtcttccaggaggggaaggacatccacacccagaccgcaagctggatgttcggcgtccccccggaggccgtggaccccctgatgcgccgggcggccaagacggtgaacttcggcgtcctctacggcatgtccgcccataggctctcccaggagcttgccatcccctacgaggaggcggtggcctttatagagcgctacttccaaagcttccccaaggtgcgggcctggatagaaaagaccctggaggaggggaggaagcggggctacgtggaaaccctcttcggaagaaggcgctacgtgcccgacctcaacgcccgggtgaagagcgtcagggaggccgcggagcgcatggccttcaacatgcccgtccagggcaccgccgccgacctcatgaagctcgccatggtgaagctcttcccccgcctccgggagatgggggcccgcatgctcctccaggtcgccaacgagctcctcctggaggccccccaagcgcgggccgaggaggtggcggctttggccaaggaggccatggagaaggcctatcccctcgccgtgcccctggaggtggaggtggggatgggggaggactggctttccgccaagggtcaccaccaccaccaccac

SEQ ID NO: 261 - protein, 838 aa, Artificial Sequence
  Description of Artificial Sequence:  Synthetic
MNSLPLFEPKGRVLLVDGHHLAYRTFFALKGLTTSRGEPVQAVYGFAKSLLKALREDGDVVIVVFDAKAPSFRHQTYEAYKAGRAPTPEDFPRQLALIKEMVDLLGLERLEVPGFEADDVLATLAKKAEKEGYEVRILTADRDLYQLLSERISILHPEGYLITPEWLWEKYGLKPSQWVDYRALAGDPSDNIPGVKGIGEKTAAKLIREWGSLENLLKHLEQVKPASVREKILSHMEDLKLSLELSRVHTDLLLQVDFARRREPDREGLKAFLERLEFGSLLHEFGLLESPVAAEEAPWPPPEGAFVGYVLSRPEPMWAELNALAAAWGGRVHRAADPLAGLKDLKEVRGLLAKDLAVLASREGLDLVPGDDPMLLAYLLDPSNTTPEGVARRYGGEWTEDAAHRALLSERLHRNLLKRLEGEEKLLWLYHEVEKPLSRVLAHMEATGVRRDVAYLQALSLELAEEIRRLEEEVFRLAGHPFNLNSRDQLERVLFDELRLPALKKTKKTGKRSTSAAVLEALREAHPIVEKILQHRELTKLKNTYVDPLPSLVHPRTGRLHTRFNQTATATGRLSSSDPNLQNIPVRTPLGQRIRRAFVAEAGWALVALDYSQIELRVLAHLSGDENLIRVFQEGKDIHTQTASWMFGVPPEAVDPLMRRAAKTVNFGVLYGMSAHRLSQELAIPYEEAVAFIERYFQSFPKVRAWIEKTLEEGRKRGYVETLFGRRRYVPDLNARVKSVREAAERMAFNMPVQGTAADLMKLAMVKLFPRLREMGARMLLQVANELLLEAPQARAEEVAALAKEAMEKAYPLAVPLEVEVGMGEDWLSAKGHHHHHH

SEQ ID NO: 262 - DNA, 2526 bp, Artificial Sequence
  Description of Artificial Sequence:  Synthetic
atgaattccaccccactttttgacctggaggaaccccccaagcgggtgcttctggtggacggccaccacctggcctaccgcaccttctatgccctgagcctcaccacctcccggggggagccggtgcagatggtctacggcttcgcccggagcctcctcaaggccttgaaggaggacggacaggcggtggtcgtggtctttgacgccaaggccccctccttccgccacgaggcctacgaggcctacaaggcgggccgggcccccaccccggaggacttcccccgccagctcgccttggtcaagcggctggtggaccttctgggcctggtccgcctcgaggccccggggtacgaggcggacgacgtcctgggcaccctggccaagaaggccgaaagggaggggatggaggtgcgcatcctcacgggagaccgggacttcttccagctcctctccgagaaggtctcggtcctcctgccggacgggaccctggtcaccccaaaggacgtccaggagaagtacggggtgcccccggagcgctgggtggacttccgcgccctcacgggggaccgctcggacaacatccccggggtggcggggataggggagaagaccgcccttcgactcctcgcagagtgggggagcgtggaaaacctcctgaagaacctggaccgggtaaagccggactcgctccggcgcaagatagaggcgcacctcgaggacctccacctctccttagacctggcccgcatccgcaccgacctccccctggaggtggactttaaggccctgcgccgcaggacccccgacctggagggcctgagggcctttttggaggagctggagttcggaagcctcctccacgagttcggcctcctgggaggggagaagccccgggaggaggccccctggcccccgcccgaaggggccttcgtgggcttcctcctttcccgcaaggagcccatgtgggcggagcttctggccctggcggcggcctcgggcggccgcgtccaccgggcccccgagccttataaagccctcagggacctgaaggaggcgcgggggcttctcgccaaagacctgagcgttctggccctgagggaaggccttggcctcccgcccggcgacgaccccatgctcctcgcctacctcctggacccttcgaacaccacccccgagggggtggcccggcgctacggcggggagtggacggaggaggcgggggagcgggccgccctttccgagaggctcttcgccaacctgcttaagaggcttgagggggaggagaggctcctttggctttaccgggaggtggagaggcccctttccgctgtcctggcccatatggaggccacgggggtgcgcctggacgtggcctatctcagggccttgtccctggaggtggccgaggagatcgcccgcctcgaggccgaggtcttccgcctggccggccaccccttcaacctcaactcccgggaccagctggaaagggtcctctttgacgagctagggcttcccgccatcaagaagacgcaaaagaccggcaagcgctccaccagcgccgccgtcctggaggccctccgcgaggcccaccccatcgtggagaagatcctgcagtaccgggagctcaccaagctgaagagcacctacattgaccccttgccggacctcatccaccccaggacgggccgcctccacacccgcttcaaccagacggccacggccacgggcaggctaagtagctccgatcccaacctccagaacatccccgtccgcaccccgcttgggcagaggatccgccgggccttcatcgccgaggaggggtggctattggtggccctggactatagccagatagagctcagggtgctggcccacctctccggcgacgagaacctgatccgggtcttccaggaggggcgggacatccacacggagaccgccagctggatgttcggcgtcccccgggaggccgtggaccccctgatgcgccgggcggccaagaccatcaacttcggggtcctctacggcatgtcggcccaccgcctctcccaggagctagccatcccttacgaggaggcccaggccttcattgagcgctactttcagagcttccccaaggtgcgggcctggattgagaagaccctggaggagggcaggaggcgggggtacgtggagaccctcttcggccgccgccgctacgtgccagacctagaggcccgggtgaagagcgtgcgggaggcggccgagcgcatggccttcaacatgcccgtccagggcaccgccgccgacctcatgaagctggctatggtgaagctcttccccaggctggaggaaatgggggccaggatgctccttcaggtcgccaacgagctggtcctcgaggccccaaaagagagggcggaggccgtggcccggctggccaaggaggtcatggagggggtgtatcccctggccgtgcccctggaggtggaggtggggataggggaggactggctctccgccaaggagcaccaccaccaccaccac

SEQ ID NO: 263 - protein, 842 aa, Artificial Sequence
  Description of Artificial Sequence:  Synthetic
MNSTPLFDLEEPPKRVLLVDGHHLAYRTFYALSLTTSRGEPVQMVYGFARSLLKALKEDGQAVVVVFDAKAPSFRHEAYEAYKAGRAPTPEDFPRQLALVKRLVDLLGLVRLEAPGYEADDVLGTLAKKAEREGMEVRILTGDRDFFQLLSEKVSVLLPDGTLVTPKDVQEKYGVPPERWVDFRALTGDRSDNIPGVAGIGEKTALRLLAEWGSVENLLKNLDRVKPDSLRRKIEAHLEDLHLSLDLARIRTDLPLEVDFKALRRRTPDLEGLRAFLEELEFGSLLHEFGLLGGEKPREEAPWPPPEGAFVGFLLSRKEPMWAELLALAAASGGRVHRAPEPYKALRDLKEARGLLAKDLSVLALREGLGLPPGDDPMLLAYLLDPSNTTPEGVARRYGGEWTEEAGERAALSERLFANLLKRLEGEERLLWLYREVERPLSAVLAHMEATGVRLDVAYLRALSLEVAEEIARLEAEVFRLAGHPFNLNSRDQLERVLFDELGLPAIKKTQKTGKRSTSAAVLEALREAHPIVEKILQYRELTKLKSTYIDPLPDLIHPRTGRLHTRFNQTATATGRLSSSDPNLQNIPVRTPLGQRIRRAFIAEEGWLLVALDYSQIELRVLAHLSGDENLIRVFQEGRDIHTETASWMFGVPREAVDPLMRRAAKTINFGVLYGMSAHRLSQELAIPYEEAQAFIERYFQSFPKVRAWIEKTLEEGRRRGYVETLFGRRRYVPDLEARVKSVREAAERMAFNMPVQGTAADLMKLAMVKLFPRLEEMGARMLLQVANELVLEAPKERAEAVARLAKEVMEGVYPLAVPLEVEVGIGEDWLSAKEHHHHHH

SEQ ID NO: 264 - DNA, 2514 bp, Artificial Sequence
  Description of Artificial Sequence:  Synthetic
atgaattccctgcccctctttgagcccaagggccgggtgcttctggtggacggccaccacctggcctaccgtaccttttttgccctgaagggcctcaccaccagccgcggggagccggtccaggcggtgtacgggtttgccaagagccttttgaaggcgctaagggaagacggggatgtggtgatcgtggtgtttgacgccaaggccccctccttccgccaccagacctacgaggcctacaaggcggggcgggctcccacccccgaggactttccccggcagcttgcccttatcaaggagatggtggaccttttgggcctggagcgcctcgaggtgccgggctttgaagcggatgacgtcctggctaccctggccaagaaggcggaaaaggaaggctacgaagtgcgcatcctcaccgcggaccgggacctttaccagcttctttcggagcgaatctccatccttcacccggagggttacctgatcaccccggagtggctttgggagaagtatgggcttaagccttcccagtgggtggactaccgggccttggccggggacccttccgacaacatccccggcgtgaagggcatcggggagaagacggcggccaagctgatccgggagtggggaagcctggaaaaccttcttaagcacctggaacaggtgaaacctgcctccgtgcgggagaagatccttagccacatggaggacctcaagctatccctggagctatcccgggtgcacacggacttgctccttcaggtggacttcgcccggcgccgggagccggaccgggaggggcttaaggcctttttggagaggctggagttcggaagcctcctccacgagttcggcctgttggaaagcccggtggcggcggaggaagctccctggccgccccccgagggagccttcgtggggtacgttctttcccgccccgagcccatgtgggcggagcttaacgccttggccgccgcctggggcggccgcgtccaccgggcccccgagccttataaagccctcagggacctgaaggaggcgcgggggcttctcgccaaagacctgagcgttctggccctgagggaaggccttggcctcccgcccggcgacgaccccatgctcctcgcctacctcctggacccttcgaacaccacccccgagggggtggcccggcgctacggcggggagtggacggaggaggcgggggagcgggccgccctttccgagaggctcttcgccaacctgcttaagaggcttgagggggaggagaggctcctttggctttaccgggaggtggagaggcccctttccgctgtcctggcccatatggaggccacgggggtgcgcctggacgtggcctatctcagggccttgtccctggaggtggccgaggagatcgcccgcctcgaggccgaggtcttccgcctggccggccaccccttcaacctcaactcccgggaccagctggaaagggtcctctttgacgagctagggcttcccgccatcaagaagacgcaaaagaccggcaagcgctccaccagcgccgccgtcctggaggccctccgcgaggcccaccccatcgtggagaagatcctgcagtaccgggagctcaccaagctgaagagcacctacattgaccccttgccggacctcatccaccccaggacgggccgcctccacacccgcttcaaccagacggccacggccacgggcaggctaagtagctccgatcccaacctccagaacatccccgtccgcaccccgcttgggcagaggatccgccgggccttcatcgccgaggaggggtggctattggtggccctggactatagccagatagagctcagggtgctggcccacctctccggcgacgagaacctgatccgggtcttccaggaggggcgggacatccacacggagaccgccagctggatgttcggcgtcccccgggaggccgtggaccccctgatgcgccgggcggccaagaccatcaacttcggggtcctctacggcatgtcggcccaccgcctctcccaggagctagccatcccttacgaggaggcccaggccttcattgagcgctactttcagagcttccccaaggtgcgggcctggattgagaagaccctggaggagggcaggaggcgggggtacgtggagaccctcttcggccgccgccgctacgtgccagacctagaggcccgggtgaagagcgtgcgggaggcggccgagcgcatggccttcaacatgcccgtccagggcaccgccgccgacctcatgaagctggctatggtgaagctcttccccaggctggaggaaatgggggccaggatgctccttcaggtcgccaacgagctggtcctcgaggccccaaaagagagggcggaggccgtggcccggctggccaaggaggtcatggagggggtgtatcccctggccgtgcccctggaggtggaggtggggataggggaggactggctctccgccaaggagcaccaccaccaccaccac

SEQ ID NO: 265 - protein, 838 aa, Artificial Sequence
  Description of Artificial Sequence:  Synthetic
MNSLPLFEPKGRVLLVDGHHLAYRTFFALKGLTTSRGEPVQAVYGFAKSLLKALREDGDVVIVVFDAKAPSFRHQTYEAYKAGRAPTPEDFPRQLALIKEMVDLLGLERLEVPGFEADDVLATLAKKAEKEGYEVRILTADRDLYQLLSERISILHPEGYLITPEWLWEKYGLKPSQWVDYRALAGDPSDNIPGVKGIGEKTAAKLIREWGSLENLLKHLEQVKPASVREKILSHMEDLKLSLELSRVHTDLLLQVDFARRREPDREGLKAFLERLEFGSLLHEFGLLESPVAAEEAPWPPPEGAFVGYVLSRPEPMWAELNALAAAWGGRVHRAPEPYKALRDLKEARGLLAKDLSVLALREGLGLPPGDDPMLLAYLLDPSNTTPEGVARRYGGEWTEEAGERAALSERLFANLLKRLEGEERLLWLYREVERPLSAVLAHMEATGVRLDVAYLRALSLEVAEEIARLEAEVFRLAGHPFNLNSRDQLERVLFDELGLPAIKKTQKTGKRSTSAAVLEALREAHPIVEKILQYRELTKLKSTYIDPLPDLIHPRTGRLHTRFNQTATATGRLSSSDPNLQNIPVRTPLGQRIRRAFIAEEGWLLVALDYSQIELRVLAHLSGDENLIRVFQEGRDIHTETASWMFGVPREAVDPLMRRAAKTINFGVLYGMSAHRLSQELAIPYEEAQAFIERYFQSFPKVRAWIEKTLEEGRRRGYVETLFGRRRYVPDLEARVKSVREAAERMAFNMPVQGTAADLMKLAMVKLFPRLEEMGARMLLQVANELVLEAPKERAEAVARLAKEVMEGVYPLAVPLEVEVGIGEDWLSAKEHHHHHH

SEQ ID NO: 266 - DNA, 2505 bp, Thermus thermophilus
atggaggcgatgcttccgctctttgaacccaaaggccgggtcctcctggtggacggccaccacctggcctaccgcaccttcttcgccctgaagggcctcaccacgagccggggcgaaccggtgcaggcggtctacggcttcgccaagagcctcctcaaggccctgaaggaggacgggtacaaggccgtcttcgtggtctttgacgccaaggccccctccttccgccacgaggcctacgaggcctacaaggcggggagggccccgacccccgaggacttcccccggcagctcgccctcatcaaggagctggtggacctcctggggtttacccgcctcgaggtccccggctacgaggcggacgacgttctcgccaccctggccaagaaggcggaaaaggaggggtacgaggtgcgcatcctcaccgccgaccgcgacctctaccaactcgtctccgaccgcgtcgccgtcctccaccccgagggccacctcatcaccccggagtggctttgggagaagtacggcctcaggccggagcagtgggtggacttccgcgccctcgtgggggacccctccgacaacctccccggggtcaagggcatcggggagaagaccgccctcaagctcctcaaggagtggggaagcctggaaaacctcctcaagaacctggaccgggtaaagccagaaaacgtccgggagaagatcaaggcccacctggaagacctcaggctctccttggagctctcccgggtgcgcaccgacctccccctggaggtggacctcgcccaggggcgggagcccgaccgggaggggcttagggccttcctggagaggctggagttcggcagcctcctccacgagttcggcctcctggaggcccccgcccccctggaggaggccccctggcccccgccggaaggggccttcgtgggcttcgtcctctcccgccccgagcccatgtgggcggagcttaaagccctggccgcctgcagggacggccgggtgcaccgggcagcagaccccttggcggggctaaaggacctcaaggaggtccggggcctcctcgccaaggacctcgccgtcttggcctcgagggaggggctagacctcgtgcccggggacgaccccatgctcctcgcctacctcctggacccctccaacaccacccccgagggggtggcgcggcgctacgggggggagtggacggaggacgccgcccaccgggccctcctctcggagaggctccatcggaacctccttaagcgcctcgagggggaggagaagctcctttggctctaccacgaggtggaaaagcccctctcccgggtcctggcccacatggaggccaccggggtacggctggacgtggcctaccttcaggccctttccctggagcttgcggaggagatccgccgcctcgaggaggaggtcttccgcttggcgggccaccccttcaacctcaactcccgggaccagctggaaagggtgctctttgacgagcttaggcttcccgccttggggaagacgcaaaagacaggcaagcgctccaccagcgccgcggtgctggaggccctacgggaggcccaccccatcgtggagaagatcctccagcaccgggagctcaccaagctcaagaacacctacgtggaccccctcccaagcctcgtccacccgaggacgggccgcctccacacccgcttcaaccagacggccacggccacggggaggcttagtagctccgaccccaacctgcagaacatccccgtccgcacccccttgggccagaggatccgccgggccttcgtggccgaggcgggttgggcgttggtggccctggactatagccagatagagctccgcgtcctcgcccacctctccggggacgaaaacctgatcagggtcttccaggaggggaaggacatccacacccagaccgcaagctggatgttcggcgtccccccggaggccgtggaccccctgatgcgccgggcggccaagacggtgaacttcggcgtcctctacggcatgtccgcccataggctctcccaggagcttgccatcccctacgaggaggcggtggcctttatagagcgctacttccaaagcttccccaaggtgcgggcctggatagaaaagaccctggaggaggggaggaagcggggctacgtggaaaccctcttcggaagaaggcgctacgtgcccgacctcaacgcccgggtgaagagcgtcagggaggccgcggagcgcatggccttcaacatgcccgtccagggcaccgccgccgacctcatgaagctcgccatggtgaagctcttcccccgcctccgggagatgggggcccgcatgctcctccaggtccacgacgagctcctcctggaggccccccaagcgcgggccgaggaggtggcggctttggccaaggaggccatggagaaggcctatcccctcgccgtgcccctggaggtggaggtggggatgggggaggactggctttccgccaagggttag

SEQ ID NO: 267 - protein, 834 aa, Thermus aquaticus
MEAMLPLFEPKGRVLLVDGHHLAYRTFFALKGLTTSRGEPVQAVYGFAKSLLKALKEDGYKAVFVVFDAKAPSFRHEAYEAYKAGRAPTPEDFPRQLALIKELVDLLGFTRLEVPGYEADDVLATLAKKAEKEGYEVRILTADRDLYQLVSDRVAVLHPEGHLITPEWLWEKYGLRPEQWVDFRALVGDPSDNLPGVKGIGEKTALKLLKEWGSLENLLKNLDRVKPENVREKIKAHLEDLRLSLELSRVRTDLPLEVDLAQGREPDREGLRAFLERLEFGSLLHEFGLLEAPAPLEEAPWPPPEGAFVGFVLSRPEPMWAELKALAACRDGRVHRAADPLAGLKDLKEVRGLLAKDLAVLASREGLDLVPGDDPMLLAYLLDPSNTTPEGVARRYGGEWTEDAAHRALLSERLHRNLLKRLEGEEKLLWLYHEVEKPLSRVLAHMEATGVRLDVAYLQALSLELAEEIRRLEEEVFRLAGHPFNLNSRDQLERVLFDELRLPALGKTQKTGKRSTSAAVLEALREAHPIVEKILQHRELTKLKNTYVDPLPSLVHPRTGRLHTRFNQTATATGRLSSSDPNLQNIPVRTPLGQRIRRAFVAEAGWALVALDYSQIELRVLAHLSGDENLIRVFQEGKDIHTQTASWMFGVPPEAVDPLMRRAAKTVNFGVLYGMSAHRLSQELAIPYEEAVAFIERYFQSFPKVRAWIEKTLEEGRKRGYVETLFGRRRYVPDLNARVKSVREAAERMAFNMPVQGTAADLMKLAMVKLFPRLREMGARMLLQVHDELLLEAPQARAEEVAALAKEAMEKAYPLAVPLEVEVGMGEDWLSAKG

SEQ ID NO: 268 - protein, 832 aa, Artificial Sequence
  Description of Artificial Sequence:  Synthetic
MEFLPLFEPKGRVLLVDGHHLAYRTFFALKGLTTSRGEPVQAVYGFAKSLLKALREDGDVVIVVFDAKAPSFRHQTYEAYKAGRAPTPEDFPRQLALIKEMVDLLGLERLEVPGFEADDVLATLAKKAEKEGYEVRILTADRDLYQLLSERISILHPEGYLITPEWLWEKYGLKPSQWVDYRALAGDPSDNIPGVKGIGEKTAAKLIREWGSLENLLKHLEQVKPASVREKILSHMEDLKLSLELSRVHTDLLLQVDFARRREPDREGLKAFLERLEFGSLLHEFGLLESPVAAEEAPWPPPEGAFVGYVLSRPEPMWAELNALAAAWEGRVYRAEDPLEALRGLGEVRGLLAKDLAVLALREGIALAPGDDPMLLAYLLDPSNTAPEGVARRYGGEWTEEAGERALLSERLYAALLERLKGEERLLWLYEEVEKPLSRVLAHMEATGVRLDVAYLKALSLEVEAEIRRFEEEVHRLAGHPFNLNSRDQLERVIFDELGLPAIGKTEKTGKRSTSAAVLEALREAHPIVDRILQYRELSKLKGTYIDPLPALVHPKTNRLHTRFNQTATATGRLSSSDPNLQNIPVRTPLGQRIRRAFVAEEGWRLVVLDYSQIELRVLAHLSGDENLIRVFQEGQDIHTQTASWMFGVPPEAVDSLMRRAAKTINFGVLYGMSAHRLSGELAIPYEEAVAFIERYFQSYPKVRAWIEKTLAEGRERGYVETLFGRRRYVPDLASRVKSIREAAERMAFNMPVQGTAADLMKLAMVKLFPRLQELGARMLLQVHDELVLEAPKEQAEEVAQEAKRTMEEVWPLKVPLEVEVGIGEDWLSAKA

SEQ ID NO: 269 - DNA, 63 bp, Artificial Sequence
  Description of Artificial Sequence:  Synthetic
gcgcggcggcgggtgtggtggttacgcgcagcgtgaccgctacacttgccagcgccctagcgc

SEQ ID NO: 270 - DNA, 30 bp, Artificial Sequence
  Description of Artificial Sequence:  Synthetic
gcgctagggcgctggcaagtgtagcggtca

SEQ ID NO: 271 - DNA, 35 bp, Artificial Sequence
  Description of Artificial Sequence:  Synthetic
gatcgctgcgcgtaaccaccacacccgcgccgcgc

SEQ ID NO: 272 - DNA, 30 bp, Artificial Sequence
  Description of Artificial Sequence:  Synthetic
ggactctgcctcaagacggtagtcaacgtg

SEQ ID NO: 273 - DNA, 16 bp, Artificial Sequence
  Description of Artificial Sequence:  Synthetic
cacgttgactaccgtc

SEQ ID NO: 274 - DNA, 34 bp, Artificial Sequence
  Description of Artificial Sequence:  Synthetic
catgtcaagcagtcctaactttgaggcagagtcc

SEQ ID NO: 275 - DNA, 36 bp, Artificial Sequence
  Description of Artificial Sequence:  Synthetic
cagaccatgaattccaccccactttttgacctggag

SEQ ID NO: 276 - DNA, 36 bp, Artificial Sequence
  Description of Artificial Sequence:  Synthetic
gtggacgcggccgcccgaggccgccgccagggccag

SEQ ID NO: 277 - DNA, 36 bp, Artificial Sequence
  Description of Artificial Sequence:  Synthetic
cagaccatgaattccctgcccctctttgagcccaag

SEQ ID NO: 278 - DNA, 36 bp, Artificial Sequence
  Description of Artificial Sequence:  Synthetic
gtaaaccgcgccgccccaggcggcggccaaggcgtt

SEQ ID NO: 279 - DNA, 2520 bp, Artificial Sequence
  Description of Artificial Sequence:  Synthetic
atgaattccgaggcgatgcttccgctctttgaacccaaaggccgggtcctcctggtggacggccaccacctggcctaccgtaccttttttgccctgaagggcctcaccaccagccggggggagccggtccaggcggtgtacgggtttgccaagagccttttgaaggcgctaagagaagacggggacgcggtgatcgtggtctttgacgccgaggccccctccttccgccacgaggcctacggggggtacaaggcggggcgggctcccacccccgaggactttccccggcagcttgcccttatcaaggagctggtggacctcctggggtttacccgcctcgaggtccccggctacgaggcggacgacgttctcgccaccctggccaagaaggcggaaaaggaggggtacgaggtgcgcatcctcaccgccgacaaagacctttaccagctcctttccgaccgcatccacgtcctccaccccgaggggtacctcatcaccccggcctggctttgggaaaagtacggcctgaggcccgaccagtgggccgactaccgggccctgaccggggacgagtccgacaaccttcccggggtcaagggcatcggggagaagaccgccctcaagctcctcaaggagtgggggagcctggaagccctcctcaagaacctggaccggctgaagcccgccatccgggagaagatcctggcccacatggacgatctgaagctctcctgggacctggccaaggtgcgcaccgacctgcccctggaggtggacttcgccaaaaggcgggagcccgaccgggaggggcttaaggcctttttggagaggctggagttcggcagcctcctccacgagttcggcctcctgggaggggagaagccccgggaggaggccccctggcccccgccggaaggggccttcgtgggctttgtgctttcccgcaaggagcccatgtgggccgatcttctggccctggccgcctgcaggggcggccgcgtgcaccgggcagcagaccccttggcggggctaaaggacctcaaggaggtccggggcctcctcgccaaggacctcgccgtcttggcctcgagggaggggctagacctcgtgcccggggacgaccccatgctcctcgcctacctcctggacccttcgaacaccacccccgagggggtggcgcggcgctacgggggggagtggacggaggacgccgcccaccgggccctcctctcggagaggctccatcggaacctccttaagcgcctcgagggggaggagaagctcctttggctctaccacgaggtggaaaagcccctctcccgggtcctggcccatatggaggccaccggggtacggcgggacgtggcctaccttcaggccctttccctggagcttgcggaggagatccgccgcctcgaggaggaggtcttccgcttggcgggccaccccttcaacctcaactcccgggaccagctggaaagggtgctctttgacgagcttaggcttcccgccttgaagaagacgaagaagacaggcaagcgctccaccagcgccgcggtgctggaggccctacgggaggcccaccccatcgtggagaagatcctccagcaccgggagctcaccaagctcaagaacacctacgtggaccccctcccaagcctcgtccacccgaggacgggccgcctccacacccgcttcaaccagacggccacggccacggggaggcttagtagctccgaccccaacctgcagaacatccccgtccgcacccccttgggccagaggatccgccgggccttcgtggccgaggcgggttgggcgttggtggccctggactatagccagatagagctccgcgtcctcgcccacctctccggggacgaaaacctgatcagggtcttccaggaggggaaggacatccacacccagaccgcaagctggatgttcggcgtccccccggaggccgtggaccccctgatgcgccgggcggccaagacggtgaacttcggcgtcctctacggcatgtccgcccataggctctcccaggagcttgccatcccctacgaggaggcggtggcctttatagagcgctacttccaaagcttccccaaggtgcgggcctggatagaaaagaccctggaggaggggaggaagcggggctacgtggaaaccctcttcggaagaaggcgctacgtgcccgacctcaacgcccgggtgaagagcgtcagggaggccgcggagcgcatggccttcaacatgcccgtccagggcaccgccgccgacctcatgaagctcgccatggtgaagctcttcccccgcctccgggagatgggggcccgcatgctcctccaggtcgccaacgagctcctcctggaggccccccaagcgcgggccgaggaggtggcggctttggccaaggaggccatggagaaggcctatcccctcgccgtgcccctggaggtggaggtggggatgggggaggactggctttccgccaagggtcaccaccaccaccaccac

SEQ ID NO: 280 - protein, 840 aa, Artificial Sequence
  Description of Artificial Sequence:  Synthetic
MNSEAMLPLFEPKGRVLLVDGHHLAYRTFFALKGLTTSRGEPVQAVYGFAKSLLKALREDGDAVIVVFDAEAPSFRHEAYGGYKAGRAPTPEDFPRQLALIKELVDLLGFTRLEVPGYEADDVLATLAKKAEKEGYEVRILTADKDLYQLLSDRIHVLHPEGYLITPAWLWEKYGLRPDQWADYRALTGDESDNLPGVKGIGEKTALKLLKEWGSLEALLKNLDRLKPAIREKILAHMDDLKLSWDLAKVRTDLPLEVDFAKRREPDREGLKAFLERLEFGSLLHEFGLLGGEKPREEAPWPPPEGAFVGFVLSRKEPMWADLLALAACRGGRVHRAADPLAGLKDLKEVRGLLAKDLAVLASREGLDLVPGDDPMLLAYLLDPSNTTPEGVARRYGGEWTEDAAHRALLSERLHRNLLKRLEGEEKLLWLYHEVEKPLSRVLAHMEATGVRRDVAYLQALSLELAEEIRRLEEEVFRLAGHPFNLNSRDQLERVLFDELRLPALKKTKKTGKRSTSAAVLEALREAHPIVEKILQHRELTKLKNTYVDPLPSLVHPRTGRLHTRFNQTATATGRLSSSDPNLQNIPVRTPLGQRIRRAFVAEAGWALVALDYSQIELRVLAHLSGDENLIRVFQEGKDIHTQTASWMFGVPPEAVDPLMRRAAKTVNFGVLYGMSAHRLSQELAIPYEEAVAFIERYFQSFPKVRAWIEKTLEEGRKRGYVETLFGRRRYVPDLNARVKSVREAAERMAFNMPVQGTAADLMKLAMVKLFPRLREMGARMLLQVANELLLEAPQARAEEVAALAKEAMEKAYPLAVPLEVEVGMGEDWLSAKGHHHHHH

We claim:

1. A composition comprising a nucleic acid sequence selected from the group consisting of SEQ ID NO:279 and the complement of SEQ ID NO:279.

2. A vector comprising the nucleic acid sequence of claim 1.

3. A host cell comprising the vector of claim 2.

4. A composition comprising a polypeptide encoded by a nucleic acid selected from the group consisting of SEQ ID NO:279 and sequences that hybridize to the complement of SEQ ID NO:279 under stringent conditions.

5. The composition of claim 4, wherein said polypeptide comprises SEQ ID NO:280.

6. A method for producing an altered enzyme with improved functionality in a nucleic acid cleavage assay comprising:
a) providing:
i) a polypeptide comprising SEQ ID NO:280;
ii) a nucleic acid encoding a polypeptide of SEQ ID NO:280; and
iii) a nucleic acid test substrate;
b) introducing one or more heterologous domains into said nucleic acid to produce an altered nucleic acid encoding an altered enzyme;
c) contacting said altered enzyme and said polypeptide comprising SEQ ID NO:280 with said nucleic acid test substrate to produce cleavage products; and
d) comparing cleavage product contacted with said altered enzyme to cleavage products contacted with said polypeptide comprising SEQ ID NO:280.
